(19) United States
(12) Patent Application Publication
(10) Pub. No.: US 2011/0236410 A1
(43) Pub. Date: Sep. 29, 2011

(54) KLEBSIELLA ANTIGENS

(75) Inventors: Sharmila Bakshi, Vienna (AT); Thomas Cipps, Vienna (AT); Markus Hanner, Pressbaum (AT); Jutta Pikalo, Strau (AT); Christina Satke, Moedling (AT); Eszter Nagy, Vienna (AT); Urban Lundberg, Dresden (DE); Dagmar Zierer, Vienna (AT); Andreas Meinke, Pressbaum (AT); Birgit Noiges, Vienna (AT); Ulrike Stierschneider, Vienna (AT); Alexander von Gabain, Vienna (AT)

(73) Assignee: Intercell AG, Vienna (AT)

(21) Appl. No.: 12/598,176

(22) PCT Filed: Apr. 29, 2008
(86) PCT No.: PCT/EP08/55214

§ 371 Date: Sep. 23, 2010

(30) Foreign Application Priority Data
May 2, 2007 (EP) 07107344.9

(51) Int. Cl. A61K 39/108; C07H 21/04; C07H 21/02; C12N 15/63; C12N 5/10; C12N 1/00; C07K 14/26; C07K 7/08; C07K 7/06; C07K 16/12; A61P 37/04; A61P 31/04

(52) U.S. Cl. 424/190.1; 536/23.7; 435/320.1; 435/325; 435/243; 435/419; 530/350; 530/326; 530/327; 530/324; 530/328; 530/329; 530/325; 530/387.9

(57) ABSTRACT

The present invention relates to isolated nucleic acid molecules which encode an antigen, a vector which comprises such nucleic acid molecule, and a host cell comprising such vector. Furthermore, the invention provides antigens from a Klebsiella species, as well as fragments and variants thereof, a process for producing such antigens, and a process for producing a cell, which expresses such antigen. Moreover, the present invention provides antibodies binding to such antigen, a hybridoma cell producing such antibodies, methods for producing such antibodies, a pharmaceutical composition comprising such nucleic acid molecule, antigen, vector or antibody, the use of such nucleic acid molecule, antigen, vector or antibody for the preparation of a pharmaceutical composition, methods for identifying an antagonist capable of binding such antigen or of reducing or inhibiting the interaction activity of such antigen, methods for diagnosing an infection and methods for the treatment or prevention of an infection. More specifically such antigens are produced by or associated with bacterial pathogens causing nosocomial infections or bacterial infections caused by Klebsiella pneumoniae.

[0001] The present invention relates to isolated nucleic acid molecules which encode an antigen, a vector which comprises such nucleic acid molecule, and a host cell comprising such vector. Furthermore, the invention provides antigens from a Klebsiella species, as well as fragments and variants thereof, a process for producing such antigens, and a process for producing a cell, which expresses such antigen. Moreover, the present invention provides antibodies binding to such antigen, a hybridoma cell producing such antibodies, methods for producing such antibodies, a pharmaceutical composition comprising such nucleic acid molecule, antigen, vector or antibody, the use of such nucleic acid molecule, antigen, vector or antibody for the preparation of a pharmaceutical composition, methods for identifying an antagonist capable of binding such antigen or of reducing or inhibiting the interaction activity of such antigen, methods for diagnosing an infection and methods for the treatment or prevention of an infection. More specifically such antigens are produced by or associated with bacterial pathogens causing nosocomial infections or bacterial infections caused by Klebsiella pneumoniae.

[0002] Klebsiella pneumoniae (K. pneumoniae) is a gram negative, facultative anaerobic bacterium. Strains of K. pneumoniae are distinguished by the presence of a capsular polysaccharide, of which there are 77 antigenic types. This capsule encases the entire cell surface, accounts for the large appearance of the organism on gram stain, and provides resistance against many host defense mechanisms. Colonies are large and highly mucoid. Klebsiella pneumoniae has the ability to fix nitrogen i.e. to convert atmospheric nitrogen gas to ammonium.

[0003] Klebsiellae have two common habitats, one being the environment, where they are found in surface water, sewage and soil, and the other being the mucosal surface of mammals such as humans, horses or swine, which they colonize. In human, K. pneumoniae is present as a saprophyte in the respiratory, intestinal and urogenital tracts. When Klebsiella bacteria get outside of the gut, however, serious infection can occur.

[0004] Klebsiella pneumoniae is a common hospital-acquired pathogen, causing urinary tract infections, nosocomial pneumonia, intraabdominal infections, surgical wound infections and infection of the blood. All of these infections can progress to shock and death if not treated early in an aggressive fashion. K. pneumoniae is also a potential community-acquired pathogen. It is estimated that Klebsiella spp. account for 8% of endemic hospital infection and 3% of epidemic outbreaks (Stamm E. et al., 1981).

[0005] Klebsiella's pathogenicity can be attributed to its production of a heat-stable enterotoxin. The virulence factors of K. pneumoniae identified so far include capsular polysaccharides (CPS), lipopolysaccharides, adhesins (type 1 and 3 pili, KPF-28 fimbria, CF29K and aggregative adhesin) and iron acquisition systems (Podschun R et al., 1998).

[0006] K. pneumoniae infections are common in hospitals where they cause pneumonia (characterized by emission of bloody sputum) and urinary tract infections in catheterized patients. In fact, K. pneumoniae is second only to E. coli as a urinary tract pathogen. It accounts for 6 to 17 percent of all nosocomial urinary tract infection (UTI). Klebsiella infections are encountered far more often now than in the past. This is probably due to the bacterium's antibiotic resistance properties. Klebsiella species may contain resistance plasmids (R-plasmids) which confer resistance to such antibiotics as Ampicillin and Carbenicillin (Wu et al., 2005). To make matters worse, the R-plasmids can be transferred to other enteric bacteria not necessarily of the same species. Hospital outbreaks of multidrug-resistant Klebsiella spp. are often caused by a new type of strain, an ESBL producer (extended spectrum β-lactamase). The incidence of ESBL-producing strains among clinical Klebsiella isolates has been steadily increasing over the past several years. Frequencies of up to 40% have been reported in certain regions. To treat K. pneumoniae infections, there are few antibiotics available like Cefepime, Polymyxin B (Parchuri et al., 2005), Carbapenem (Meropenem and Imipenem) (Ueda Y. et al., 2005).

[0007] There are attempts to develop a vaccice against Klebsiella. Among the different bacterial constituents, two surface components are mainly being discussed as candidates for an anti-Klebsiella vaccine: LPS and CPS (Yadav et al., 2005). A great drawback of active immunization with LPS-containing vaccines is the induction of adverse toxic reactions, which are caused by the endotoxin content. CPS has been proven to be highly immunogenic and nontoxic. However, the serious disadvantage of a Klebsiella CPS vaccine is the great number of different K antigens (77 as of today). There is a 6-valent Klebsiella CPS vaccine that subsequently was proven to be safe and immunogenic (Cryz et al., 1986), but covers only 30% of Klebsiella blood isolates, while a 25-valent vaccine would cover not more than 75%. Moreover, the production of such multivalent vaccines is difficult and expensive. To overcome this circumstance, protein based vaccines against Klebsiella have to be developed. Kurupati et al. (2006) have identified a number of immunogenic antigens from Klebsiella pneumoniae, and two of the candidate genes, namely OmpA and FepA, have been further characterized in an in vivo mouse model. However, there are currently no prophylactic Klebsiella vaccines on the market or, according to public information, in active preclinical or clinical development. The Klebsiella vaccine development program (Klebgen Berna®) at Berna Biotech has been discontinued.

[0008] A vaccine can contain a whole variety of different antigens. Examples of antigens are whole-killed or attenuated organisms, subfractions of these organisms/tissues, proteins, or, in their most simple form, peptides. Antigens can also be recognized by the immune system in form of glycosylated proteins or peptides and may also be or contain polysaccharides or lipids. Short peptides can be used since for example cytotoxic T-cells (CTL) recognize antigens in form of short, usually 8-11 amino acids long peptides in conjunction with major histocompatibility complex (MHC). B-cells can recognize linear epitopes as short as 4-5 amino acids, as well as three-dimensional structures (conformational epitopes). In order to obtain sustained, antigen-specific immune responses, adjuvants need to trigger immune cascades that involve all cells of the immune system. Primarily, adjuvants are acting, but are not restricted in their mode of action, on so-called antigen presenting cells (APCs). These cells usually first encounter the antigen(s) followed by presentation of processed or unmodified antigen to immune effector cells. Intermediate cell types may also be involved. Only effector cells with the appropriate specificity are activated in a productive immune response. The adjuvant may also locally retain antigens and co-injected other factors. In addition the adjuvant may act as a chemoattractant for other immune cells or may act locally and/or systemically as a stimulating agent for the immune system.

[0009] There have been concerns to develop an inactivated whole cell vaccine for humans because of the potential risk, that it may induce cross-reactive antibodies to human antigens. Therefore, subunit vaccines are considered to have the greatest potential in preventing infections by Klebsiella pneumoniae.

[0010] The problem underlying the present invention was to provide means for the development of pharmaceutical compositions such as vaccines against nosocomial infections caused by Klebsiella. More particularly, the problem was to provide an efficient, relevant and comprehensive set of nucleic acid molecules or antigens, or fragments or variants thereof, from Klebsiella that can be used for the preparation of said pharmaceutical compositions. A still further problem was to provide methods and means for producing an antigen, a fragment or variant thereof. Yet another problem was to provide pharmaceutical compositions comprising said nucleic acids or said antigens. A still further problem of the invention was to provide antibodies, pharmaceutical compositions comprising said antibodies, methods for the production of said antibodies and the use of said antibodies for the preparation of a pharmaceutical preparation. Furthermore, the object of the present invention was to provide methods for identifying an antagonist capable of binding an antigen, or a fragment or variant thereof, as well as to provide methods for identifying an antagonist capable of reducing or inhibiting the interaction activity of such an antigen to its interaction partner. A further problem of the present invention was to provide methods for diagnosing an infection with a Klebsiella organism. Still another problem underlying the invention was to provide methods for treating Klebsiella infections, and to provide methods for immunizing an animal or human.

[0011] The problem underlying the present invention is solved in one aspect by an isolated nucleic acid molecule encoding an antigen or a fragment thereof, comprising a nucleic acid sequence, which is selected from the group consisting of:
[0012] a) a nucleic acid molecule having at least 70% sequence identity to a nucleic acid molecule having a nucleotide sequence selected from the group comprising Seq ID Nos 1 to 187 and Seq ID No 375,
[0013] b) a nucleic acid molecule which is complementary to the nucleic acid molecule of a),
[0014] c) a nucleic acid molecule comprising at least 15 sequential bases of the nucleic acid molecule of a) or b),
[0015] d) a nucleic acid molecule which anneals under stringent hybridisation conditions to the nucleic acid molecule of a), b), or c),
[0016] e) a nucleic acid molecule which, but for the degeneracy of the genetic code, would hybridise to the nucleic acid molecule defined in a), b), c), or d).

[0017] In an embodiment of the invention the sequence identity to Seq ID Nos 1 to 187 or Seq ID No 375 is at least 80%, more preferably at least 90%, still more preferably at least 95%, 96%, 97%, 98%, or 99%, or most preferably 100%.

[0018] In another embodiment the nucleic acid is DNA.

[0019] In an alternative embodiment the nucleic acid is RNA.

[0020] In still another embodiment the nucleic acid molecule is isolated from a genomic DNA, preferably from a species selected from the group comprising Klebsiella, preferably K. pneumoniae including the three subspecies pneumoniae, ozaenae and rhinoscleromatis, K. oxytoca, K. planticola, K. terrigena, and K. ornithinolytica, and more preferably from K. pneumoniae or K. oxytoca. The nomenclature or classification of Klebsiellae is used herein according to Ørskov, I. (1984).

[0021] In an embodiment of the invention the fragment is an active fragment or an active variant thereof.

[0022] In an embodiment the nucleic acid encodes an antigen or fragment thereof, which comprises or consists of a polypeptide or peptide fragment from Klebsiella, preferably K. pneumoniae including the three subspecies pneumoniae, ozaenae and rhinoscleromatis, K. oxytoca, K. planticola, K. terrigena, and K. ornithinolytica, and more preferably from K. pneumoniae or K. oxytoca.

[0023] The problem underlying the present invention is further solved by a vector comprising a nucleic acid molecule as described above.

[0024] In an embodiment the vector is adapted for recombinant expression of the antigen, or fragment thereof, encoded by the nucleic acid molecule as defined above.

[0025] The present invention also relates to a host cell comprising the vector as defined above.

[0026] The problem underlying the present invention is solved in a further aspect by an antigen that is immunologically reactive with sera from a human having a Klebsiella infection, or an uninfected healthy human who was previously infected with Klebsiella, wherein the antigen comprises an isolated polypeptide or an active fragment or an active variant thereof from Klebsiella, preferably K. pneumoniae including the three subspecies pneumoniae, ozaenae and rhinoscleromatis, K. oxytoca, K. planticola, K. terrigena, and K. ornithinolytica, and more preferably from K. pneumoniae or K. oxytoca.

[0027] The term “uninfected healthy human” as used herein comprises those individuals who have or had multiple encounters with the pathogen, which may result in colonization, but which either do not result in any symptoms, or which result in mild diseases. Said term and the rationale of selecting sera of uninfected healthy humans for antigen identification is further defined in Nagy, E. et al. (2003).

[0028] Another aspect of the present invention relates to an antigen, comprising or consisting of an isolated polypeptide selected from the group consisting of Seq ID Nos 188 to 374 and Seq ID No 376, or an active fragment or an active variant thereof.

[0029] In an embodiment of the invention said polypeptide is encoded by a nucleic acid molecule as defined above.

[0030] In another embodiment the active fragment of the antigen consists of at least 50%, especially at least 60%, preferably at least 70%, more preferably at least 80%, still more preferably at least 90%, even more preferably at least 95%, 96%, 97% or 98%, most preferably 99% of said polypeptide, especially of a polypeptide as defined by any of the Seq ID Nos 188 to 374 or Seq ID No 376.

[0031] In another embodiment the active variant of the antigen has at least 50%, especially at least 60%, preferably at least 70%, more preferably at least 80%, still more preferably at least 90%, even more preferably at least 95%, 96%, 97% or 98%, most preferably 99% sequence identity to the polypeptide, especially to a polypeptide as defined by any of the Seq ID Nos 188 to 374 or Seq ID No 376.

[0032] In one embodiment of the present invention the active fragment of the antigen comprises or consists of amino acids 2-130 of Seq ID No 205; amino acids 26-356 of Seq ID No 216; amino acids 2-180 of Seq ID No 223; amino acids 1-168 of Seq ID No 224; amino acids 23-397 of Seq ID No 235 amino acids 2-420 and 414-847 of Seq ID No 240; amino acids 582-1099 of Seq ID No 241; amino acids 1-245 of Seq ID No 242; amino acids 24-703 of Seq ID No 247; amino acids 23-328 of Seq ID No 252; amino acids 23-248 of Seq ID No 263; amino acids 2-335 of Seq ID No 267; amino acids 38-633 of Seq ID No 268; amino acids 26-742 of Seq ID No 269; amino acids 26-429 of Seq ID No 281; or amino acids 1-632 of Seq ID No 285. The fragments as listed above are further defined in Seq ID Nos 188 to 203 and 376, (see also Table 16).

[0033] In another embodiment, the active variant of the antigen has at least 50%, especially at least 60%, preferably at least 70%, more preferably at least 80%, still more preferably at least 90%, even more preferably at least 95%, 96%, 97% or 98%, most preferably 99% sequence identity to amino acids 2-130 of Seq ID No 205; amino acids 26-356 of Seq ID No 216; amino acids 2-180 of Seq ID No 223; amino acids 1-168 of Seq ID No 224; amino acids 23-397 of Seq ID No 235; amino acids 2-420 and 414-847 of Seq ID No 240; amino acids 582-1099 of Seq ID No 241; amino acids 1-245 of Seq ID No 242; amino acids 24-703 of Seq ID No 247; amino acids 23-328 of Seq ID No 252; amino acids 23-248 of Seq ID No 263; amino acids 2-335 of Seq ID No 267; amino acids 38-633 of Seq ID No 268; amino acids 26-742 of Seq ID No 269; amino acids 26-429 of Seq ID No 281; or amino acids 1-632 of Seq ID No 285.

[0034] In still another embodiment, the active variant of the antigen as defined above is derived from the homologous sequence of a different strain and/or serotype of K. pneumoniae, particularly wherein the serotype is K1, K2, K3, K10, K21, K22, K30, K55, K64, O1, O2a, O3, O4, O5, or O12, or any combination of said K and said 0 serotypes.

[0035] Examples of variants of KPORF-13 (SEQ ID No 216) are given in Table 8 and SEQ ID Nos 413-451. Examples of variants of KPORF-21 (SEQ ID No 224) are given in Table 9 and SEQ ID Nos 452-500. Examples of variants of KPORF-32 (SEQ ID No 235) are given in Table 10 and SEQ ID Nos 501-540. Examples of variants of KPORF-37 (SEQ ID No 240) are given in Table 11 and SEQ ID Nos 541-579. Examples of variants of KPORF-38 (SEQ ID No 241) are given in Table 12 and SEQ ID Nos 580-617. Examples of variants of KPORF-39 (SEQ ID No 242) are given in Table 13 and SEQ ID Nos 618-667. Examples of variants of KPORF-60 (SEQ ID No 263) are given in Table 14 and SEQ ID Nos 668-717. Examples of variants of KPORF-65 (SEQ ID No 268) are given in Table 15 and SEQ ID Nos 718-765.

[0036] Accordingly, in yet another embodiment of the present invention, the active variant of the antigen as defined above is selected from the group consisting of SEQ ID No 413 to 765.

[0037] In still another embodiment, the antigen is further defined by
[0038] a) 1 to 400 additional amino acid residue(s), preferably 1 to 350, 1 to 300, 1 to 250, or 1 to 200, more preferably 1 to 150, even more preferably at most 1 to 100, still more preferably at most 1 to 50, most preferably 1, 2, 3, 4, 5, 10, 20, 30 or 40 additional amino acid residue(s) to the active fragment of the antigen comprising or consisting of amino acids 2-420 or 414-847 of Seq ID No 240, or to the active variant of the antigen derived from amino acids 2-420 or 414-847 of Seq ID No 240; or
[0039] b) 1 to 1100 additional amino acid residue(s), preferably 1 to 1000, 1 to 900, 1 to 800, 1 to 700, 1 to 600, 1 to 500, 1 to 400, or 1 to 300, more preferably 1 to 200, even more preferably at most 1 to 100, still more preferably at most 1 to 50, most preferably 1, 2, 3, 4, 5, 10, 20, 30 or 40 additional amino acid residue(s) to the active fragment of the antigen comprising or consisting of amino acids 582-1099 of Seq ID No 241, or to the active variant of the antigen derived from amino acids 582-1099 of Seq ID No 241.

[0040] The additional amino acid residue(s) may be homologous to the antigen as defined above. Homologous refers to any amino acid residue(s) which is/are identical to the amino acid sequence of the Klebsiella antigen from which the fragment is derived.

[0041] Alternatively or additionally, the polypeptide may comprise or consist of the antigen, optionally the additional sequence as defined above and at least one amino acid residue heterologous to the antigen.

[0042] In an embodiment of the invention, the antigen further comprises or consists of at least one amino acid residue heterologous to the antigen, preferably an amino acid sequence of a marker protein.

[0043] The additional sequence or amino acid residue(s) as defined above consist(s) of (an) amino acid residue(s), which may be any amino acid, which may be either an L- and/or a D-amino acid, naturally occurring and otherwise. Preferably the amino acid is any naturally occurring amino acid such as alanine, cysteine, aspartic acid, glutamic acid, phenylalanine, glycine, histidine, isoleucine, lysine, leucine, methionine, asparagine, proline, glutamine, arginine, serine, threonine, valine, tryptophan or tyrosine.

[0044] However, the amino acid may also be a modified or unusual amino acid. Examples of those are 2-aminoadipic acid, 3-aminoadipic acid, beta-alanine, 2-aminobutyric acid, 4-aminobutyric acid, 6-aminocaproic acid, 2-aminoheptanoic acid, 2-aminoisobutyric acid, 3-aminoisobutyric acid, 2-aminopimelic acid, 2,4-diaminobutyric acid, desmosine, 2,2′-diaminopimelic acid, 2,3-diaminopropionic acid, N-ethylglycine, N-ethylasparagine, hydroxylysine, allo-hydroxylysine, 3-hydroxyproloine, 4-hydroxyproloine, isodesmosine, allo-isoleucine, N-methylglycine, N-methylisoleucine, 6-N-Methyllysine, N-methylvaline, norvaline, norleucine or ornithine. Additionally, the amino acid may be subject to modifications such as posttranslational modifications. Examples of modifications include acetylation, amidation, blocking, formylation, gamma-carboxyglutamic acid hydroxylation, glycosilation, methylation, phosphorylation and sulfatation. If more than one additional or heterologous amino acid residue is present in the peptide, the amino acid residues may be the same or different from one another.

[0045] In one embodiment the peptide of the invention further encompasses at least one amino acid residue heterologous to the antigen. The feature “heterologous amino acid” or “amino acid heterologous to the antigen” refers to any amino acid which is different from that amino acid located adjacent to the antigen in any naturally occurring protein of Klebsiellae, preferably K. pneumoniae including the three subspecies pneumoniae, ozaenae and rhinoscleromatis, K. oxytoca, K. planticola, K. terrigena, and K. ornithinolytica, and more preferably from K. pneumoniae or K. oxytoca. Therefore, the protein of the invention encompassing at least one heterologous amino acid refers to a protein which is different from any naturally occurring protein of Klebsiellae or fragments thereof, preferably K. pneumoniae including the three subspecies pneumoniae, ozaenae and rhinoscleromatis, K. oxytoca, K. planticola, K. terrigena, and K. ornithinolytica, and more preferably from K. pneumoniae or K. oxytoca.

[0046] In one embodiment, the additional amino acid residue(s) is/are flanking the antigen N-terminally, C-terminally, or N- and C-terminally.

[0047] In another embodiment, the invention relates to an antigen as described above, whereby said additional amino acid residue(s) is/are flanking the antigen defined by
[0048] a) amino acids 2-420 of Seq ID No 240 or the variant derived thereof C-terminally,
[0049] b) amino acids 414-847 of Seq ID No 240 or the variant derived thereof N-terminally, or
[0050] c) amino acids 582-1099 of Seq ID No 241 or the variant derived thereof N- and/or C-terminally.

[0051] In another embodiment, the antigen further comprises or consists of either a leader or a secretory sequence, a sequence employed for purification, or a proprotein sequence.

[0052] Another aspect of the present invention relates to an antigen comprising at least one core amino acid sequence as indicated in column “Predicted immunogenic aa” or “Location of identified immunogenic region” of Table 1, or as defined by columns “From aa” and “To aa” of Table 4, or as indicated in column “Location in protein (aa)” of Table 5, whereby more preferably the core amino acid sequence is selected from the group consisting of: amino acids 11-27, 35-47, 68-107, 113-122, 124-136, 140-146, 152-164, 168-174, 183-201, 211-218, 228-243, 246-253 and 180-226 of Seq ID No 204; amino acids 13-31, 48-59, 69-91, 109-115, 121-127 and 46-105 of Seq ID No 205; amino acids 12-44, 49-95, 102-145, 148-178, 184-229, 233-244, 249-273, 292-299, 304-329, 334-348, 354-365, 367-385, 394-426, 428-440, 444-487, 503-527, 531-539, 546-554, 556-584 and 273-286 of Seq ID No 206; amino acids 7-17, 22-32, 34-41, 55-77, 79-86, 93-111, 118-126, 131-148, 152-162, 165-177, 183-197, 213-220, 234-250, 253-262, 267-294 and 211-269 of Seq ID No 207; amino acids 22-29, 41-56, 58-66, 79-88, 94-121, 124-131, 134-157, 162-171, 173-180, 189-197, 201-214, 216-224, 242-254, 257-270, 282-287, 290-302, 309-315, 320-325, 341-355, 362-368, 372-378 and 1-48 of Seq ID No 208; amino acids 5-15, 18-35, 48-61, 65-71, 112-119, 138-154, 157-169, 179-208, 214-223, 226-232, 243-250, 256-262, 277-286, 289-296, 338-348, 352-363, 370-376, 385-408, 420-436, 443-454, 462-483, 498-561, 563-592, 600-642, 661-671, 673-709, 714-733, 748-754, 771-776, 798-806, 808-821, 823-839 and 31-83 of Seq ID No 209; amino acids 5-14, 21-26, 31-41, 59-77, 101-115, 132-145, 147-156, 180-185, 188-197 and 97-158 of Seq ID No 210; amino acids 6-18, 23-43, 45-56, 69-80, 87-97, 112-123, 135-151, 164-171, 178-193, 200-227, 249-258, 262-274, 279-291, 302-308, 322-327, 329-336, 351-363, 366-373, 384-399, 403-411, 415-434, 440-446, 461-482, 488-506, 510-516, 518-551, 574-589, 607-629, 634-665, 667-687, 694-712, 725-739, 743-751, 753-768 and 521-583 of Seq ID No 211; amino acids 4-13, 19-44, 55-63, 71-82, 89-110, 120-130, 132-138, 145-161, 168-182, 189-258, 261-272, 278-288, 290-301 and 11-76 of Seq ID No 212; amino acids 4-22, 43-56, 63-68, 81-90, 93-99, 139-148, 155-160, 170-176, 189-195, 207-218, 227-232, 241-249, 251-258, 260-266, 277-295, 300-327, 329-336, 340-356, 384-390, 418-423, 427-433, 438-444 and 383-428 of Seq ID No 213; amino acids 10-18, 32-37, 45-55, 60-69, 77-83, 89-95, 120-125, 133-170, 172-185, 193-211, 214-223, 232-249, 255-275, 277-303, 305-310, 320-328, 334-341, 347-353, 355-369, 380-386, 389-395 and 71-85 of Seq ID No 214; amino acids 4-23, 27-35, 67-73, 80-103, 117-126, 132-138, 140-159, 162-171, 180-194, 198-208, 211-218, 228-234, 239-253, 262-270, 272-291, 296-305 and 39-110 of Seq ID No 215; amino acids 13-24, 27-34, 37-66, 69-88, 99-104, 149-155, 164-175, 184-193, 199-209, 227-235, 264-273, 276-285, 288-315, 323-335, 346-353, 56-111 and 199-261 of Seq ID No 216; amino acids 11-22, 25-48, 51-60, 64-72, 80-96, 108-122, 132-137, 142-150, 152-167, 175-199, 214-229, 237-244, 252-258, 260-266, 279-287, 301-340, 345-350 and 109-153 of Seq ID No 217; amino acids 37-43, 50-57, 65-82, 87-109, 123-129, 141-150, 152-157, 166-172, 179-203, 209-241, 249-284, 290-300, 308-326, 329-335, 345-357, 359-368, 379-386, 390-417, 420-425, 438-444, 461-466, 473-490, 497-505, 524-534, 541-550, 586-597, 608-614, 622-632, 660-666, 679-694, 696-706, 708-722, 725-731, 737-763, 784-789, 810-825, 837-854, 857-880, 882-895, 901-907, 911-928, 14-76 and 176-220 of Seq ID No 218; amino acids 9-16, 38-52, 61-86, 93-100, 110-117, 123-132, 138-145, 151-169, 172-181, 186-202, 208-225, 227-253, 264-275, 289-295, 320-329, 335-342 and 113-193 of Seq ID No 219; amino acids 11-18, 24-30, 42-49, 53-63, 69-80, 87-93, 95-103, 144-171, 173-185, 193-200, 202-208, 215-221, 242-261, 266-273, 277-286, 290-299, 322-328, 338-351, 354-377, 391-409, 441-451, 461-466, 499-515, 521-527, 562-569, 621-629, 647-663, 676-682, 694-701, 703-713, 725-731, 735-744, 755-764, 793-800 and 490-547 of Seq ID No 220; amino acids 4-11, 14-22, 38-70, 81-90, 97-114, 118-132, 147-171, 173-181, 187-202, 244-250, 252-298, 301-311, 313-331, 342-368, 410-418, 446-451, 456-462, 468-474, 476-492, 499-507, 519-528, 552-565, 568-575, 584-613, 618-624, 626-649 and 417-489 of Seq ID No 221; amino acids 4-9, 32-53, 66-72, 74-90, 97-104, 110-130, 133-139, 144-152, 166-177, 203-213, 215-241, 256-275, 291-304, 307-316, 321-326, 334-345, 352-367 and 201-255 of Seq ID No 222; amino acids 13-19, 26-43, 66-72, 80-85, 95-101, 109-125, 131-137 and 25-107 of Seq ID No 223; amino acids 13-24, 35-43, 50-56, 58-68, 77-83, 104-110, 117-125, 132-138, 140-153 and 19-66 of Seq ID No 224; amino acids 15-31, 37-42, 47-54, 68-87, 89-96, 107-117, 121-127, 131-137, 145-151, 176-182, 220-226, 232-246, 250-257, 291-300, 317-325, 328-333, 337-359, 368-393, 403-428, 460-478, 480-493, 500-506, 511-516, 519-526, 528-559, 565-572, 584-595, 597-605, 608-613, 626-648, 679-684, 687-693, 703-714, 718-735, 742-750, 757-765, 768-788, 793-799, 813-819, 823-829, 839-850 and 576-623 of Seq ID No 225; amino acids 10-35, 37-60, 63-76, 79-86, 88-97, 108-113, 118-126, 128-134, 138-145, 153-159, 168-188, 194-208, 211-243, 255-260, 270-276, 285-301, 307-346, 348-367 and 275-339 of Seq ID No 226; amino acids 4-17, 21-33, 35-42, 47-64, 72-80, 85-92, 98-103, 125-147, 151-161, 165-177, 183-230, 232-246, 256-262, 284-306, 310-328, 331-367, 369-383, 392-399 and 32-85 of Seq ID No 227; amino acids 5-11, 18-27, 42-52, 60-65, 75-84, 90-102, 107-116, 125-178, 184-206, 221-233, 235-242, 249-257, 264-277, 288-317 and 267-313 of Seq ID No 228; amino acids 5-11, 14-42, 50-75, 79-86, 89-98, 120-125, 152-160, 166-181, 185-193, 200-207 and 85-114 of Seq ID No 229; amino acids 4-30, 36-43, 46-55, 63-111, 144-152, 159-168, 179-189, 191-200, 205-213 and 37-109 of Seq ID No 230; amino acids 20-45, 57-77, 80-100, 119-126, 131-137, 143-169, 179-185, 195-203, 207-231, 235-264, 282-302, 320-329, 341-347, 353-359, 361-373 and 266-296 of Seq ID No 231; amino acids 5-22, 24-37, 41-55, 57-65, 72-78, 90-103, 105-116, 119-130, 164-170, 190-202, 209-231, 244-254, 260-276, 300-339, 344-350, 355-376, 389-397, 399-406, 408-421, 429-437 and 103-152 of Seq ID No 232; amino acids 8-16, 18-25, 31-47, 71-82, 87-102, 104-114, 126-156, 176-183, 190-200, 205-212, 218-228, 231-243, 256-279, 287-301, 303-312, 324-332, 335-348, 351-357, 365-380, 395-412, 422-451, 456-464, 467-483, 501-507 and 405-468 of Seq ID No 233; amino acids 4-18, 21-39, 46-56, 63-69, 72-86, 116-130, 132-160, 162-190, 196-201, 209-231, 233-241, 251-265, 269-282, 292-298, 309-324, 333-369, 391-415, 417-427, 436-454, 471-480, 482-499, 510-518, 521-533, 537-543, 545-561, 571-581, 585-597, 599-607, 609-635, 638-643, 650-665, 671-685, 687-695, 701-707, 710-720, 724-736, 747-757, 764-769, 772-784, 791-796, 808-820 and 317-401 of Seq ID No 234; amino acids 4-12, 15-33, 58-77, 82-89, 98-106, 108-118, 120-135, 141-147, 152-160, 168-215, 225-233, 235-247, 250-264, 284-312, 314-321, 336-343, 359-374, 386-394 and 159-218 of Seq ID No 235; amino acids 4-16, 24-36, 40-47, 49-56, 61-81, 84-143, 148-156, 158-164, 170-175, 194-206, 208-214 and 126-203 of Seq ID No 236; amino acids 28-45, 50-61, 94-111, 113-124, 137-142, 147-173, 180-188, 190-196, 202-223, 229-235, 239-249, 262-270, 280-288, 290-321, 325-332, 347-355, 359-368, 389-407, 415-427, 429-453, 458-465, 477-485, 499-505, 516-527, 531-549, 569-592, 594-602, 605-615, 628-635, 647-659, 662-683, 727-735, 760-765, 771-780, 788-809, 811-818 and 549-630 of Seq ID No 237; amino acids 21-28, 33-40, 48-100, 104-111, 113-134 and 1-46 of Seq ID No 238; amino acids 12-24, 31-41, 53-61, 73-87, 112-128, 133-140, 151-156 and 26-98 of Seq ID No 239; amino acids 4-9, 19-26, 32-56, 58-67, 71-81, 90-95, 97-105, 112-118, 124-132, 138-144, 147-167, 169-177, 199-207, 212-217, 231-241, 250-260, 266-272, 274-282, 289-296, 299-310, 316-331, 344-350, 352-363, 368-377, 381-394, 399-406, 412-450, 459-473, 486-503, 508-514, 518-548, 564-570, 579-587, 602-608, 616-623, 628-635, 638-654, 678-688, 691-696, 703-709, 716-723, 761-772, 784-793, 819-826, 835-844 and 790-834 of Seq ID No 240; amino acids 4-10, 18-36, 43-50, 63-71, 75-105, 109-117, 134-140, 145-157, 176-182, 184-201, 203-211, 215-225, 240-250, 262-284, 294-309, 313-319, 327-337, 350-356, 361-367, 372-393, 411-421, 428-451, 453-466, 487-492, 501-528, 535-553, 564-574, 592-605, 612-629, 631-640, 646-653, 658-666, 673-681, 713-718, 720-730, 739-749, 784-792, 821-826, 833-844, 853-863, 871-876, 885-894, 900-918, 937-950, 952-957, 972-990, 995-1001, 1024-1036, 1039-1044, 1049-1055, 1062-1089, 1091-1103, 1110-1121, 1123-1129, 1131-1151, 1157-1179, 1181-1201, 1204-1223, 1233-1244, 1269-1276, 1279-1286, 1294-1301, 1303-1309, 1315-1338, 1350-1362, 1373-1381, 1398-1406, 1412-1423, 1440-1446, 1458-1466, 1481-1487, 1492-1508, 1511-1518, 1528-1534, 1536-1547, 1553-1565, 1606-1617, 1619-1644 and 761-781 of Seq ID No 241; amino acids 6-13, 31-38, 47-60, 71-102, 107-123, 128-155, 173-179, 185-194, 210-220 and 161-232 of Seq ID No 242; amino acids 11-34, 36-43, 49-67, 74-79, 84-92, 94-100, 103-112, 120-129, 134-155, 162-173, 177-185, 189-202, 206-211 and 130-185 of Seq ID No 243; amino acids 4-10, 20-35, 37-46, 48-55, 60-66, 75-82, 87-98, 133-150, 166-172, 178-189, 208-214, 230-235, 245-251, 271-308, 319-333, 335-355, 373-380 and 117-201 of Seq ID No 244; amino acids 4-30, 54-65, 91-105, 107-131, 135-154, 163-192, 199-208, 210-224, 229-239, 248-257, 263-279, 281-294, 328-354, 373-379, 382-405, 426-453, 462-487 and 249-323 of Seq ID No 245; amino acids 4-10, 12-24, 45-55, 75-88 and 24-40 of Seq ID No 246; amino acids 4-14, 20-37, 47-53, 55-61, 75-81, 97-103, 107-124, 129-135, 139-147, 160-166, 169-175, 181-190, 202-221, 247-255, 272-285, 300-310, 318-332, 351-361, 384-397, 406-427, 442-449, 458-482, 494-503, 512-524, 531-539, 552-562, 577-588, 590-596, 600-608, 613-624, 637-668, 692-700 and 232-278 of Seq ID No 247; amino acids 33-39, 49-55, 68-84, 90-96, 104-120, 126-143, 150-159, 168-191, 197-208, 219-225, 227-233, 241-247, 63-115 and 200-250 of Seq ID No 248; amino acids 4-22, 24-34, 36-55, 57-76, 83-97, 99-117, 135-143, 145-157, 163-174, 178-198, 200-207, 209-270, 276-290, 321-335, 338-347, 367-374, 393-402, 404-411, 416-422, 443-460, 467-473 and 117-183 of Seq ID No 249; amino acids 26-37, 44-52, 57-96, 104-111, 118-124, 155-177, 179-197, 201-214, 223-233, 243-250, 257-262, 291-297, 303-314, 319-363 and 47-105 of Seq ID No 250; amino acids 36-43, 45-60, 76-97, 107-125, 131-156, 158-164 and 118-163 of Seq ID No 251; amino acids 5-32, 40-50, 52-60, 70-88, 92-101, 106-126, 138-150, 152-161, 175-193, 201-234, 237-248, 270-285, 297-303, 312-318 and 209-255 of Seq ID No 252; amino acids 4-12, 23-34, 49-55, 59-65, 70-81, 83-130 and 62-113 of Seq ID No 253; amino acids 4-26, 38-49, 69-76, 82-96, 103-119, 126-140, 143-190, 194-209, 212-218 and 100-167 of Seq ID No 254; amino acids 7-29, 35-47, 56-66, 80-94, 97-123, 125-148, 150-160, 166-173, 175-191, 193-200, 207-225 and 75-176 of Seq ID No 255; amino acids 14-36, 39-45, 51-59, 66-71, 76-88, 106-117, 121-126, 140-157, 164-187, 198-206, 210-252 and 202-256 of Seq ID No 256; amino acids 4-19, 27-35, 90-107, 120-134, 144-150, 166-175, 192-198, 221-243, 249-255, 263-278, 283-288, 305-321, 324-334, 342-349, 355-366, 377-390, 413-425, 442-448 and 130-178 of Seq ID No 257; amino acids 17-26, 41-51, 54-61, 64-72, 78-105, 117-125, 127-137, 147-155, 175-213, 230-236, 238-261, 271-277, 282-297, 309-318, 329-347, 355-372, 377-390 and 69-126 of Seq ID No 258; amino acids 4-48, 54-60, 62-69, 73-81, 88-115, 124-137, 139-154, 156-169, 171-190, 194-231, 240-273, 288-303, 336-363, 367-395, 405-411, 434-442, 449-454, 466-483, 491-507 and 226-282 of Seq ID No 259; amino acids 26-34, 39-47, 50-80, 82-88, 97-105, 108-127, 131-137, 162-180, 185-191, 198-203, 209-214, 226-247, 256-288, 296-305 and 149-239 of Seq ID No 260; amino acids 5-28, 30-54, 73-84, 89-98, 109-116, 122-128, 137-142, 163-189, 207-236, 245-280, 288-390, 404-423, 426-433, 450-474, 487-504, 506-513, 524-530, 532-595, 605-614, 620-626, 631-638, 644-657, 667-683, 686-693, 695-702, 707-733, 739-747 and 6-62 of Seq ID No 261; amino acids 23-31, 39-50, 55-67, 76-100, 117-130, 149-171, 173-185, 218-238, 242-288, 291-298, 334-346, 355-369, 382-399, 413-420, 431-438, 442-449, 455-466, 486-493, 498-508, 524-531, 540-546, 551-558, 562-570, 575-582, 585-596, 598-604, 621-630, 632-650, 670-677, 682-701, 736-749, 755-761 and 612-626 of Seq ID No 262; amino acids 4-21, 24-39, 44-68, 74-81, 85-91, 109-116, 129-138, 142-148, 173-188, 195-201, 207-212, 223-228 and 126-148 of Seq ID No 263; amino acids 4-17, 24-42, 61-67, 84-93, 96-102, 116-121, 135-143, 155-165, 177-186, 210-224, 253-259, 272-297, 299-331, 337-351, 359-367, 369-385 and 1-49 of Seq ID No 264; amino acids 4-25, 28-54, 67-81, 85-136, 138-143, 157-170, 180-190, 197-203, 205-214, 219-243, 246-270, 277-283, 290-299, 305-311 and 127-182 of Seq ID No 265; amino acids 11-20, 25-33, 75-80, 85-91, 113-124, 143-155, 161-170, 172-184 and 128-176 of Seq ID No 266; amino acids 4-9, 16-26, 28-34, 55-80, 120-143, 150-156, 158-164, 167-178, 185-190, 192-213, 221-237, 242-255, 257-272, 281-290, 325-332 and 48-106 of Seq ID No 267; amino acids 13-48, 59-70, 78-88, 95-112, 129-151, 153-161, 163-182, 214-221, 235-245, 248-277, 281-291, 293-301, 303-311, 315-320, 323-346, 377-383, 390-398, 447-454, 474-487, 491-512, 531-544, 547-553, 582-590, 597-603, 605-611, 623-629 and 410-466 of Seq ID No 268; amino acids 6-26, 39-46, 48-58, 69-75, 109-121, 139-144, 148-155, 166-172, 215-221, 261-267, 313-319, 363-386, 423-433, 447-458, 465-471, 483-494, 497-517, 558-565, 578-586, 589-597, 619-626, 636-645, 659-665, 671-680, 682-693, 733-739 and 152-206 of Seq ID No 269; amino acids 4-19, 23-35, 40-50, 52-58, 65-73, 78-103, 112-125, 146-160, 163-192, 194-200 and 29-90 of Seq ID No 270; amino acids 4-13, 17-32, 40-50, 57-67, 76-81, 88-95, 107-119, 131-142, 144-157, 171-178, 185-193, 197-207, 212-227, 231-238, 248-253, 263-310 and 90-170 of Seq ID No 271; amino acids 9-28, 57-82, 84-93, 126-135, 143-166, 173-194, 196-201, 212-220, 228-254, 269-277, 289-298, 305-316, 320-327, 330-337, 350-359, 373-378, 386-392, 403-411, 421-428, 435-441, 443-458, 465-470 and 80-141 of Seq ID No 272; amino acids 11-48, 54-67, 69-75, 89-95, 101-122, 124-131, 134-157, 159-175, 202-208, 214-228, 258-270, 272-280, 287-295, 298-310, 331-338, 340-417, 427-500, 502-509, 534-552, 556-561, 564-577, 585-592, 594-608, 621-627, 632-641, 643-652, 671-681, 683-709, 712-743, 758-764, 776-783, 789-820, 835-851, 864-883, 885-910, 913-940, 948-953, 967-976, 994-1020 and 775-825 of Seq ID No 273; amino acids 14-24, 32-54, 58-63, 70-80, 93-100, 108-125, 127-135, 142-153, 155-160, 180-191, 201-208, 210-216, 222-235, 242-264, 267-273, 276-282, 284-308 and 10-59 of Seq ID No 274; amino acids 16-28, 44-68, 70-77, 83-90, 99-129, 131-137, 145-154, 161-175, 183-190, 196-203, 205-220, 238-245, 321-328, 330-338, 366-379, 383-397, 399-405, 412-418, 442-458, 471-483, 486-505, 536-544, 562-568, 583-602, 610-618, 629-635, 641-655, 672-682, 697-705, 714-729, 744-751, 755-762, 766-771, 783-807 and 555-621 of Seq ID No 275; amino acids 4-9, 20-34, 45-54, 60-77, 79-89, 91-100, 102-149, 162-170, 177-189, 193-208, 210-222, 238-244, 252-264, 267-276, 302-307 and 100-140 of Seq ID No 276; amino acids 11-27, 30-49, 56-62, 69-74, 76-85, 94-108, 116-125, 129-147, 153-161, 165-171, 177-208, 217-223, 225-231, 237-255, 260-284, 293-300 and 73-137 of Seq ID No 277; amino acids 4-38, 40-51, 84-97, 99-106, 109-115, 119-129, 131-145, 148-160, 180-186, 188-202, 230-243, 246-267, 274-288, 290-299, 302-312, 317-327, 332-344, 353-377, 381-388, 407-419, 423-437, 447-470, 474-482, 486-494, 501-523, 531-546, 551-556 and 727-740 of Seq ID No 278; amino acids 23-52, 62-76, 87-104, 109-115, 117-123, 129-139, 143-149, 152-170, 172-191, 199-205, 212-218, 220-240, 249-256, 263-275, 297-303, 308-342, 349-380, 382-394, 414-420, 430-441, 446-452, 460-475, 488-505, 514-531, 533-539, 546-568, 570-577, 579-588, 613-625, 632-670, 672-716, 718-745, 759-769, 785-798, 801-807 and 272-324 of Seq ID No 279; amino acids 4-34, 36-43, 56-73, 80-87, 101-134, 148-159, 161-170, 178-185, 195-206, 211-221, 223-248, 259-271, 276-295, 297-308 and 241-296 of Seq ID No 280; amino acids 5-31, 44-50, 64-74, 86-94, 132-147, 154-167, 196-203, 209-219, 253-260, 284-289, 300-312, 319-327, 335-340, 358-364, 376-383 and 166-202 of Seq ID No 281; amino acids 4-9, 12-27, 29-71, 77-84, 90-108, 114-142, 147-164, 180-213, 217-227, 229-282, 291-309, 322-329, 336-353, 365-370 and 317-364 of Seq ID No 282; amino acids 36-41, 52-66, 71-83, 89-95, 116-127, 154-174, 176-184, 200-206, 230-237, 248-259, 269-284, 307-316, 376-383, 399-418, 424-442, 445-451, 454-462 and 1-50 of Seq ID No 283; amino acids 9-14, 33-49, 64-72, 87-92, 103-109, 123-128, 130-141, 143-154, 160-166, 182-214, 237-247, 251-260, 292-300, 327-332, 337-350, 357-365, 388-398, 405-411, 422-428, 451-459, 478-488, 520-531, 534-540, 558-564, 580-586, 591-600, 605-615, 629-635, 641-653, 658-672, 212-244 and 533-611 of Seq ID No 284; amino acids 4-10, 17-27, 30-37, 44-62, 80-85, 94-114, 118-131, 134-141, 148-161, 171-212, 218-241, 248-261, 274-313, 325-336, 342-348, 359-373, 391-397, 424-431, 454-474, 489-495, 497-503, 505-515, 548-553, 560-580, 591-610 and 277-324 of Seq ID No 285; amino acids 7-16, 18-24, 30-47, 49-70, 83-99, 103-117, 126-141, 146-153, 159-165, 177-194, 198-221, 236-246, 255-262, 273-279, 283-296, 301-332, 338-411, 422-428, 434-440, 452-458, 463-469, 494-509, 511-517, 524-531, 548-554, 564-572 and 335-389 of Seq ID No 286; amino acids 9-15, 33-54, 56-80, 102-108 and 1-42 of Seq ID No 287; amino acids 15-36, 42-55, 58-68 and 54-77 of Seq ID No 288; amino acids 55-75, 89-96, 98-110 and 14-36 of Seq ID No 289; amino acids 8-14, 29-51, 73-101, 110-117 and 70-114 of Seq ID No 290; amino acids 20-25, 29-34, 41-52, 60-67, 69-85, 90-100, 114-122, 136-142, 160-170, 174-181 and 21-58 of Seq ID No 291; amino acids 14-22 and 4-13 of Seq ID No 292; amino acids 22-40, 54-66, 88-105, 109-118 and 31-74 of Seq ID No 293; amino acids 5-11, 18-32, 47-60, 66-73, 83-92, 113-120, 126-141, 151-164, 167-174, 201-211 and 118-129 of Seq ID No 294; amino acids 5-11, 18-24, 32-40, 47-53 and 25-54 of Seq ID No 295; amino acids 18-24, 31-48 and 5-55 of Seq ID No 296; amino acids 10-16, 26-32, 47-56, 85-95 and 10-62 of Seq ID No 297; amino acids 4-12, 16-26 and 25-34 of Seq ID No 298; amino acids 19-29, 45-51, 63-68, 76-92, 103-110, 114-120, 123-133, 135-141 and 14-78 of Seq ID No 299; amino acids 4-18, 47-61 and 57-93 of Seq ID No 300; amino acids 17-29, 44-50 and 26-38 of Seq ID No 301; amino acids 5-19, 55-64, 78-85, 95-101, 104-112 and 24-33 of Seq ID No 302; amino acids 4-10 and 12-31 of Seq ID No 303; amino acids 4-12, 27-41, 43-58, 60-67, 76-86 and 13-65 of Seq ID No 304; amino acids 30-38, 57-67 and 5-32 of Seq ID No 305; amino acids 30-43 and 2-21 of Seq ID No 306; amino acids 14-20, 23-36, 41-48 and 1-52 of Seq ID No 307; amino acids 18-33, 51-58, 76-82 and 32-46 of Seq ID No 308; amino acids 25-31 and 2-16 of Seq ID No 309; amino acids 14-23, 50-58 and 9-49 of Seq ID No 310; amino acids 4-10, 22-31, 35-45, 48-68, 71-80 and 17-66 of Seq ID No 311; amino acids 4-24, 28-42, 46-56, 63-69, 87-94, 112-131 and 2-46 of Seq ID No 312; amino acids 4-15, 19-28, 34-41, 52-62, 78-86 and 2-20 of Seq ID No 313; amino acids 4-11, 16-30, 32-42 and 7-38 of Seq ID No 314; amino acids 4-20, 22-31 and 22-38 of Seq ID No 315; amino acids 4-19 and 17-32 of Seq ID No 316; amino acids 7-13, 17-22, 27-33, 80-100 and 26-40 of Seq ID No 317; amino acids 10-18, 22-48 and 32-44 of Seq ID No 318; amino acids 15-24, 43-49, 73-83 and 45-93 of Seq ID No 319; amino acids 22-29, 46-55, 57-63 and 5-17 of Seq ID No 320; amino acids 10-33 and 21-35 of Seq ID No 321; amino acids 16-24 and 22-49 of Seq ID No 322; amino acids 4-16, 37-73, 76-110, 117-125, 127-132 and 2-30 of Seq ID No 323; amino acids 4-12, 23-35, 44-56, 59-88 and 22-76 of Seq ID No 324; amino acids 15-26 and 23-35 of Seq ID No 325; amino acids 12-22, 31-40 and 17-44 of Seq ID No 326; amino acids 4-9, 13-18, 29-35 and 57-64 of Seq ID No 327; amino acids 31-55, 67-81 and 25-70 of Seq ID No 328; amino acids 13-24, 51-58 and 13-26 of Seq ID No 329; amino acids 6-20, 29-40, 57-79 and 46-88 of Seq ID No 330; amino acids 8-14, 41-54, 68-76, 83-93, 106-126, 130-139 and 12-72 of Seq ID No 331; amino acids 5-13, 17-24, 41-55, 64-69, 80-85, 94-107, 109-115 and 53-88 of Seq ID No 332; amino acids 5-12, 32-54, 57-64 and 20-33 of Seq ID No 333; amino acids 4-16, 40-48, 50-58, 62-68, 75-85, 92-104, 108-116, 124-134 and 68-128 of Seq ID No 334; amino acids 7-13, 19-29, 34-40, 54-71, 76-81, 91-144, 147-155, 157-188 and 11-83 of Seq ID No 335; amino acids 17-24, 32-41 and 6-43 of Seq ID No 336; amino acids 14-31, 38-59, 69-87, 95-102, 126-146, 157-162, 177-193, 201-227, 238-251 and 63-78 of Seq ID No 337; amino acids 10-16, 18-25, 27-41, 43-52, 59-86, 94-101, 134-140 and 38-100 of Seq ID No 338; amino acids 4-19, 23-35, 43-72, 78-92 and 37-93 of Seq ID No 339; amino acids 15-20, 27-32, 41-65, 69-82, 93-105, 107-115, 120-147, 170-178, 184-201, 214-257, 272-281, 293-314, 332-339, 358-364, 374-381, 390-397, 399-414, 428-460 and 317-375 of Seq ID No 340; amino acids 11-28, 47-55, 59-68, 76-105, 108-116, 120-144, 146-160, 167-175, 180-187, 209-233 and 144-158 of Seq ID No 341; amino acids 4-13, 58-78 and 14-77 of Seq ID No 342; amino acids 26-31, 44-49, 57-64, 67-74, 107-112, 116-152, 154-181, 202-212, 241-255 and 57-101 of Seq ID No 343; amino acids 10-41, 53-70, 81-93, 100-111, 137-147, 164-169, 183-190, 199-210, 216-221, 226-240 and 84-95 of Seq ID No 344; amino acids 12-45, 48-56, 73-79, 91-103, 106-112, 117-125, 132-143, 154-160, 178-201, 208-214, 216-225, 260-266, 276-283 and 98-115 of Seq ID No 345; amino acids 4-15, 30-42 and 29-39 of Seq ID No 346; amino acids 22-53, 55-73, 80-88 and 33-66 of Seq ID No 347; amino acids 6-23, 44-54 and 56-67 of Seq ID No 348; amino acids 8-21, 35-44, 66-75, 82-87, 94-101 and 32-94 of Seq ID No 349; amino acids 8-20, 23-32, 36-50, 53-69 and 15-69 of Seq ID No 350; amino acids 8-22 of Seq ID No 351; amino acids 31-37 and 2-31 of Seq ID No 352; amino acids 4-20, 23-39, 58-63, 71-78, 97-102 and 22-82 of Seq ID No 353; amino acids 23-44, 135-152, 168-184 and 57-116 of Seq ID No 354; amino acids 24-31, 42-50, 52-62, 93-117 and 43-94 of Seq ID No 355; amino acids 20-29 and 24-43 of Seq ID No 356; amino acids 12-57, 59-74 and 22-40 of Seq ID No 357; amino acids 7-16, 18-26, 39-45, 68-78, 86-92 and 65-82 of Seq ID No 358; amino acids 5-17, 19-34, 42-48, 56-71, 102-113, 118-129 and 67-111 of Seq ID No 359; amino acids 4-33, 50-71 and 13-55 of Seq ID No 360; amino acids 9-17, 23-30, 37-54, 69-88, 96-102, 114-123, 130-140, 143-163 and 5-70 of Seq ID No 361; amino acids 4-23, 27-52, 71-80 and 9-94 of Seq ID No 362; amino acids 13-19 and 2-21 of Seq ID No 363; amino acids 18-26, 28-52, 63-74, 94-107, 123-134 and 18-84 of Seq ID No 364; amino acids 19-33, 57-68 and 26-48 of Seq ID No 365; amino acids 4-26, 31-37, 42-59 and 12-65 of Seq ID No 366; amino acids 4-25 and 20-39 of Seq ID No 367; amino acids 40-51, 54-62, 67-75, 83-89, 126-146, 148-156 and 31-42 of Seq ID No 368; amino acids 4-15, 23-33, 38-49, 82-98 and 7-91 of Seq ID No 369; amino acids 6-26, 36-57 and 40-64 of Seq ID No 370; amino acids 6-15, 21-28, 32-38, 57-65, 78-103, 114-134, 138-144, 154-163 and 41-95 of Seq ID No 371; amino acids 13-30, 47-57, 71-76 and 25-71 of Seq ID No 372; amino acids 4-31, 43-51, 55-63, 67-72, 76-83, 88-95, 99-118, 125-132, 134-159 and 82-118 of Seq ID No 373; amino acids 4-17, 26-32, 34-40, 45-61, 67-92 and 41-97 of Seq ID No 374; amino acids 179-208 and 198-227 of Seq ID No 204; amino acids 45-69, 65-89 and 83-106 of Seq ID No 205; amino acids 269-290 of Seq ID No 206; amino acids 209-230, 226-249 and 245-269 of Seq ID No 207; amino acids-9-15, 10-33 and 28-52 of Seq ID No 208; amino acids 29-50, 45-67 and 62-85 of Seq ID No 209; amino acids 96-120, 115-139 and 134-158 of Seq ID No 210; amino acids 519-543, 539-563 and 559-584 of Seq ID No 211; amino acids 10-35, 31-56 and 52-77 of Seq ID No 212; amino acids 382-407 and 403-428 of Seq ID No 213; amino acids 66-90 of Seq ID No 214; amino acids 38-65 and 61-88 of Seq ID No 215; amino acids 56-85, 198-221, 217-240 and 236-261 of Seq ID No 216; amino acids 108-132 and 128-153 of Seq ID No 217; amino acids 13-37, 33-56, 52-76, 175-200 and 196-220 of Seq ID No 218; amino acids 132-156, 152-176 and 172-195 of Seq ID No 219; amino acids 489-512, 508-531 and 526-549 of Seq ID No 220; amino acids 416-442, 438-465 and 461-489 of Seq ID No 221; amino acids 199-222, 217-240 and 235-257 of Seq ID No 222; amino acids 25-55, 51-81 and 77-107 of Seq ID No 223; amino acids 18-46 and 42-66 of Seq ID No 224; amino acids 575-601 and 597-623 of Seq ID No 225; amino acids 274-299, 295-320 and 316-339 of Seq ID No 226; amino acids 32-61 and 57-85 of Seq ID No 227; amino acids 266-291 and 287-313 of Seq ID No 228; amino acids 85-114 of Seq ID No 229; amino acids 36-64 and 83-109 of Seq ID No 230; amino acids 264-285 and 280-300 of Seq ID No 231; amino acids 102-128 and 124-152 of Seq ID No 232; amino acids 404-429 and 445-468 of Seq ID No 233; amino acids 343-374 and 370-401 of Seq ID No 234; amino acids 158-182 and 178-202 of Seq ID No 235; amino acids 151-180 of Seq ID No 236; amino acids 549-579, 575-605 and 601-630 of Seq ID No 237; amino acids-7-23 and 19-46 of Seq ID No 238; amino acids 48-75 and 71-98 of Seq ID No 239; amino acids 789-813 and 809-834 of Seq ID No 240; amino acids 759-783 of Seq ID No 241; amino acids 160-188, 184-211 and 207-232 of Seq ID No 242; amino acids 130-159 of Seq ID No 243; amino acids 117-147, 143-173 and 169-201 of Seq ID No 244; amino acids 248-276, 272-300 and 296-323 of Seq ID No 245; amino acids 21-43 of Seq ID No 246; amino acids 231-256 and 252-278 of Seq ID No 247; amino acids 62-91, 87-115 and 199-227 of Seq ID No 248; amino acids 116-141, 137-162 and 158-183 of Seq ID No 249; amino acids 46-69, 65-87 and 82-105 of Seq ID No 250; amino acids 117-142 and 138-163 of Seq ID No 251; amino acids 208-233 and 229-255 of Seq ID No 252; amino acids 61-88 of Seq ID No 253; amino acids 99-124, 120-145 and 141-167 of Seq ID No 254; amino acids 74-103, 99-128, 124-152 and 148-176 of Seq ID No 255; amino acids 202-231 and 227-256 of Seq ID No 256; amino acids 129-154 and 150-178 of Seq ID No 257; amino acids 95-126 of Seq ID No 258; amino acids 226-256 and 252-282 of Seq ID No 259; amino acids 171-198, 194-221 and 217-240 of Seq ID No 260; amino acids 35-65 and 61-91 of Seq ID No 261; amino acids 608-631 of Seq ID No 262; amino acids 124-149 of Seq ID No 263; amino acids-14-21 and 17-49 of Seq ID No 264; amino acids 127-157 and 153-182 of Seq ID No 265; amino acids 150-176 of Seq ID No 266; amino acids 48-79 and 75-106 of Seq ID No 267; amino acids 435-466 of Seq ID No 268; amino acids 151-180 and 176-206 of Seq ID No 269; amino acids 126-151 and 167-190 of Seq ID No 270; amino acids 89-118, 114-144 and 140-170 of Seq ID No 271; amino acids 80-112 of Seq ID No 272; amino acids 9-36 of Seq ID No 274; amino acids 117-140 of Seq ID No 276; amino acids 72-97, 93-117 and 113-137 of Seq ID No 277; amino acids 723-746 of Seq ID No 278; amino acids 271-300 of Seq ID No 279; amino acids 240-271 and 267-296 of Seq ID No 280; amino acids 165-188 and 183-206 of Seq ID No 281; amino acids 316-344 and 340-364 of Seq ID No 282; amino acids-3-27 and 23-50 of Seq ID No 283; amino acids 212-244, 532-561, 557-586 and 582-611 of Seq ID No 284; amino acids 276-302 and 298-324 of Seq ID No 285; amino acids 335-364 and 360-389 of Seq ID No 286; amino acids 41-64 and 59-82 of Seq ID No 287; amino acids 53-77 of Seq ID No 288; amino acids 13-37 of Seq ID No 289; amino acids 69-94 and 90-114 of Seq ID No 290; amino acids 19-42 and 37-60 of Seq ID No 291; amino acids 1-25 of Seq ID No 292; amino acids 30-54 and 50-75 of Seq ID No 293; amino acids 111-135 of Seq ID No 294; amino acids 25-54 of Seq ID No 295; amino acids 67-98 and 94-126 of Seq ID No 334; amino acids 9-32, 27-51, 46-70 and 65-86 of Seq ID No 335; amino acids 1-24 and 20-44 of Seq ID No 336; amino acids 58-82 of Seq ID No 337; amino acids 37-62, 58-82 and 77-101 of Seq ID No 338; amino acids 37-68 and 64-93 of Seq ID No 339; amino acids 317-347 and 343-375 of Seq ID No 340; amino acids 140-164 of Seq ID No 341; amino acids 13-40, 36-60 and 55-79 of Seq ID No 342; amino acids 56-79 and 75-101 of Seq ID No 343; amino acids 77-101 of Seq ID No 344; amino acids 94-118 of Seq ID No 345; amino acids 46-105 of Seq ID No 205; amino acids 56-111 of Seq ID No 216; amino acids 25-107 of Seq ID No 223; amino acids 19-66 of Seq ID No 224; amino acids 85-114 of Seq ID No 229; amino acids 37-109 of Seq ID No 230; amino acids 266-296 of Seq ID No 231; amino acids 103-152 of Seq ID No 232; amino acids 167-218 of Seq ID No 235; amino acids 790-834 of Seq ID No 240; amino acids 761-781 of Seq ID No 241; amino acids 176-232 of Seq ID No 242; amino acids 117-201 of Seq ID No 244; amino acids 249-323 of Seq ID No 245; amino acids 232-278 of Seq ID No 247; amino acids 209-255 of Seq ID No 252; amino acids 75-176 of Seq ID No 255; amino acids 202-256 of Seq ID No 256; amino acids 130-178 of Seq ID No 257; amino acids 69-126 of Seq ID No 258; amino acids 126-148 of Seq ID No 263; amino acids 1-49 of Seq ID No 264; amino acids 127-182 of Seq ID No 265; amino acids 48-106 of Seq ID No 267; amino acids 410-466 of Seq ID No 268; amino acids 152-206 of Seq ID No 269; amino acids 555-621 of Seq ID No 275; amino acids 166-202 of Seq ID No 281; amino acids 317-364 of Seq ID No 282; amino acids 1-50 of Seq ID No 283; amino acids 277-324 of Seq ID No 285; amino acids 14-36 of Seq ID No 289; amino acids 6-43 of Seq ID No 336; amino acids 57-101 of Seq ID No 343; amino acids 84-95 of Seq ID No 344; amino acids 98-115 of Seq ID No 345.

[0053] In one embodiment the antigen further consists of
[0054] a) 1 to 50 additional amino acid residue(s), preferably 1 to 40, more preferably 1 to 30, even more preferably at most 1 to 25, still more preferably at most 1 to 10, most preferably 1, 2, 3, 4 or 5 additional amino acid residue(s); and/or
[0055] b) at least one amino acid residue heterologous to the core amino acid sequence.

[0056] Said additional amino acid residue(s) are further defined above.

[0057] In another embodiment said amino acid residue(s) is/are flanking the core amino acid sequence N-terminally, C-terminally, or N- and C-terminally.

[0058] In an embodiment of the invention the antigen comprises at least 2, at least 3, at least 4, at least 5 or at least 6 core amino acid sequences as defined above.

[0059] The problem underlying the present invention is solved in another aspect by a process for producing an antigen, or an active fragment or an active variant thereof, as defined in the present invention, comprising expressing the nucleic acid molecule as defined above.

[0060] The present invention further relates to a process for producing a cell which expresses an antigen, or an active fragment or an active variant thereof, as defined above, comprising transforming or transfecting a suitable host cell with the vector as defined above.

[0061] In an embodiment, the antigen, or the active fragment or the active variant thereof, is isolated from Klebsiella, preferably K. pneumoniae including the three subspecies pneumoniae, ozaenae and rhinoscleromatis, K. oxytoca, K. planticola, K. terrigena, and K. ornithinolytica, and more preferably from K. pneumoniae or K. oxytoca.

[0062] The problem underlying the present invention is solved in another aspect by a pharmaceutical composition, preferably a vaccine, comprising an antigen, or an active fragment or an active variant thereof, as defined above, or a nucleic acid molecule as defined above or a vector as defined above.

[0063] Another aspect of the present invention provides a pharmaceutical composition, preferably a vaccine, comprising an antigen, or an active fragment or an active variant thereof, as defined above, or a nucleic acid molecule as defined above or a vector as defined above for the treatment or prevention of an infection with Klebsiella, preferably K. pneumoniae including the three subspecies pneumoniae, ozaenae and rhinoscleromatis, K. oxytoca, K. planticola, K. terrigena, and K. ornithinolytica, and more preferably from K. pneumoniae or K. oxytoca.

[0064] In a preferred embodiment the pharmaceutical composition of the present invention further comprises an immunostimulatory substance, preferably selected from the group comprising polycationic polymers, especially polycationic peptides, immunostimulatory oligo-deoxynucleotides (ODNs), especially Oligo(dIdC)₁₃, peptides containing at least two LysLeuLys motifs, especially KLKLLLLLKLK, neuroactive compounds, especially human growth hormone, alum, Freund's complete or incomplete adjuvants, or combinations thereof.

[0065] In a more preferred embodiment of the pharmaceutical composition of the present invention the immunostimulatory substance is a combination of either a polycationic polymer and immunostimulatory deoxynucleotides or of a peptide containing at least two LysLeuLys motifs and immunostimulatory deoxynucleotides, preferably a combination of KLKLLLLLKLK and Oligo(dIdC)₁₃.

[0066] In a still more preferred embodiment of the pharmaceutical composition of the present invention the polycationic polymer is a polycationic peptide, especially polyarginine.

[0067] Still another aspect of the present invention provides an antigen, or an active fragment or an active variant thereof, as defined above, or a nucleic acid molecule as defined above or a vector as defined above for the treatment or prevention of an infection with Klebsiella, preferably K. pneumoniae including the three subspecies pneumoniae, ozaenae and rhinoscleromatis, K. oxytoca, K. planticola, K. terrigena, and K. ornithinolytica, and more preferably from K. pneumoniae or K. oxytoca.

[0068] Another preferred embodiment of the invention relates to the use of a nucleic acid molecule as defined above, or an antigen, an active fragment or an active variant thereof, as defined above, for the preparation of a pharmaceutical composition, especially for the preparation of a vaccine, for treating or preventing infections with Klebsiella, preferably K. pneumoniae including the three subspecies pneumoniae, ozaenae and rhinoscleromatis, K. oxytoca, K. planticola, K. terrigena, and K. ornithinolytica, and more preferably from K. pneumoniae or K. oxytoca.

[0069] The problem underlying the present invention is solved in a further aspect by an antibody, or at least an effective part thereof, which binds to at least a selective part of an antigen, or a fragment thereof, preferably an active fragment thereof, or a variant thereof, preferably an active variant thereof, as defined above.

[0070] In a preferred embodiment the antibody is a monoclonal antibody.

[0071] In another preferred embodiment said effective part comprises a Fab fragment, a F(ab) fragment, a F(ab) N fragment, a F (ab)₂ fragment or a Fᵥ fragment.

[0072] In still another embodiment of the invention the antibody is a chimeric antibody.

[0073] In yet another embodiment the antibody is a humanized antibody.

[0074] Another aspect of the invention relates to a hybridoma cell line, which produces an antibody as defined above.

[0075] The problem underlying the present invention is furthermore solved by a method for producing an antibody as defined above, characterized by the following steps:
[0076] a) initiating an immune response in a non-human animal by administrating an antigen, or an active fragment or an active variant thereof, as defined above, to said animal,
[0077] b) removing an antibody containing body fluid from said animal, and
[0078] c) producing the antibody by subjecting said antibody containing body fluid to further purification steps.

[0079] The invention further relates to a method for producing an antibody as defined above, characterized by the following steps:
[0080] a) initiating an immune response in a non-human animal by administrating an antigen, or an active fragment or an active variant thereof, as defined above, to said animal,
[0081] b) removing the spleen or spleen cells from said animal,
[0082] c) producing hybridoma cells of said spleen or spleen cells,
[0083] d) selecting and cloning hybridoma cells specific for said antigen, or for said active fragment or for said active variant thereof,
[0084] e) producing the antibody by cultivation of said cloned hybridoma cells, and
[0085] f) optionally conducting further purification steps.

[0086] Another aspect of the present invention is related to a pharmaceutical composition comprising an antibody as specified above.

[0087] Still another aspect relates to an antibody as defined above or a pharmaceutical composition comprising an antibody as defined above for the treatment or prevention of an infection with Klebsiella, preferably K. pneumoniae including the three subspecies pneumoniae, ozaenae and rhinoscleromatis, K. oxytoca, K. planticola, K. terrigena, and K. ornithinolytica, and more preferably from K. pneumoniae or K. oxytoca.

[0088] The problem underlying the present invention is solved in another aspect by the use of an antibody as defined above for the preparation of a pharmaceutical composition for treating or preventing infections with Klebsiella, preferably K. pneumoniae including the three subspecies pneumoniae, ozaenae and rhinoscleromatis, K. oxytoca, K. planticola, K. terrigena, and K. ornithinolytica, and more preferably from K. pneumoniae or K. oxytoca.

[0089] According to another aspect the present invention provides an antagonist, which binds or is capable of binding to an antigen, or an active fragment or active variant thereof as disclosed in the present invention. According to a still further aspect the antagonist according to the present invention is an antagonist which is capable of reducing or inhibiting the interaction activity of an antigen, or an active fragment thereof or an active variant thereof, according to the present invention to its interaction partner. Such interaction partner is, in a preferred embodiment, an antibody or a receptor, preferably a physiological receptor, of said antigen, or an active fragment thereof or an active variant thereof.

[0090] According to another aspect the present invention provides a method for identifying an antagonist capable of binding to an antigen, or an active fragment or an active variant thereof, as defined above, comprising:
[0091] a) contacting an isolated or immobilized antigen, or an active fragment or an active variant thereof, as defined above, with a candidate antagonist under conditions to permit binding of said candidate antagonist to said antigen, or an active fragment or active variant thereof, in the presence of a component capable of providing a detectable signal in response to the binding of the candidate antagonist to said antigen, or an active fragment or an active variant thereof; and
[0092] b) detecting the presence or absence of a signal generated in response to the binding of the antagonist to said antigen, or an active fragment or active variant thereof.

[0093] The problem underlying the present invention is further solved by a method for identifying an antagonist capable of reducing or inhibiting the interaction activity of an antigen, or an active fragment or an active variant thereof, as defined above, to its interaction partner comprising:
[0094] a) providing an antigen, or an active fragment or active variant thereof, as defined above,
[0095] b) providing an interaction partner to said antigen, or said active fragment or active variant thereof, especially an antibody as defined above,
[0096] c) allowing interaction of said antigen, or said active fragment or active variant thereof, to said interaction partner to form an interaction complex,
[0097] d) providing a candidate antagonist,
[0098] e) allowing a competition reaction to occur between the candidate antagonist and the interaction complex,
[0099] f) determining whether the candidate antagonist inhibits or reduces the interaction activities of the antigen, or the active fragment or the active variant thereof, with the interaction partner.

[0100] The present invention further relates to the use of any of the antigens, or an active fragment or an active variant thereof, as defined above, for the isolation and/or purification and/or identification of an interaction partner of said antigen, or said active fragment or active variant thereof.

[0101] Another aspect of the present invention relates to a method for diagnosing an infection with a Klebsiella organism comprising the steps of:
[0102] a) contacting a sample obtained from a subject with an antigen, or an active fragment or active variant thereof, as defined above; and
[0103] b) detecting the presence of an antibody against said Klebsiella organism in the sample.

[0104] In yet another aspect the present invention provides a method for diagnosing an infection with a Klebsiella organism comprising the steps of:
[0105] a) contacting a sample obtained from a subject with the antibody as defined above; and
[0106] b) detecting the presence of an antigen of said Klebsiella organism in the sample.

[0107] In an embodiment of said method the antigen of said Klebsiella organism is an antigen, or an active fragment or an active variant thereof, as defined above.

[0108] Still another aspect relates to a method for diagnosing an infection with a Klebsiella organism comprising the steps of:
[0109] a) contacting a sample obtained from a subject with a primer or a probe specific for a nucleic acid molecule, or a fragment thereof, as defined above; and
[0110] b) detecting the presence of such nucleic acid molecule or fragment thereof in the sample.

[0111] The present invention also provides a process for in vitro diagnosing a disease related to expression of an antigen or a fragment thereof according to the present invention comprising determining the presence of a nucleic acid sequence encoding said antigen or fragment thereof according to the present invention or determining the presence of the antigen or fragment thereof according to the present invention.

[0112] In an embodiment of any of the above described methods for diagnosing an infection with a Klebsiella organism the Klebsiella organism is a pathogenic Klebsiella organism, more preferably a Klebsiella organism selected from the group comprising K. pneumoniae including the three subspecies pneumoniae, ozaenae and rhinoscleromatis, K. oxytoca, K. planticola, K. terrigena, and K. ornithinolytica, and more preferably from K. pneumoniae or K. oxytoca.

[0113] Moreover, the present invention provides the use of an antigen, or a fragment or a variant thereof, as defined in the present invention for the generation of a peptide binding to said antigen, or a fragment thereof or a variant thereof, wherein the peptide is an anticaline.

[0114] Moreover, the present invention provides the use of an antigen, or an active fragment or active variant thereof, as defined above, for the preparation of a functional nucleic acid, wherein the functional nucleic acid is selected from the group comprising aptamers and spiegelmers.

[0115] In another aspect, the present invention provides the use of a nucleic acid molecule as defined above for the preparation of a functional ribonucleic acid, wherein the functional ribonucleic acid is selected from the group comprising ribozymes, antisense nucleic acids and siRNA.

[0116] The problem underlying the present invention is further solved by a method for the treatment of a Klebsiella infection in an animal or human preferably in need thereof, comprising the step of administering to said animal or human a therapeutically effective amount of an antigen, or an active fragment or an active variant thereof, or a nucleic acid molecule, or a vector, or an antibody or a pharmaceutical composition as defined in any of the preceding aspects.

[0117] In an embodiment said Klebsiella infection is an infection with K. pneumoniae including the three subspecies pneumoniae, ozaenae and rhinoscleromatis, K. oxytoca, K. planticola, K. terrigena, and K. ornithinolytica, and more preferably from K. pneumoniae or K. oxytoca.

[0118] The problem underlying the present invention is solved in another aspect by a method for immunizing an animal or human against infection with a Klebsiella organism, comprising the step of administering to said animal or human an effective amount of the antigen, or an active fragment or an active variant thereof, as defined above, or the nucleic acid molecule as defined above, or a vector as defined above, or an antibody as defined above, or a pharmaceutical composition as defined above, wherein the effective amount is suitable to elicit an immune response in said animal or human.

[0119] In an embodiment of said method for immunizing an animal or human against infection with a Klebsiella organism the Klebsiella organism is selected from the group comprising K. pneumoniae including the three subspecies pneumoniae, ozaenae and rhinoscleromatis, K. oxytoca, K. planticola, K. terrigena, and K. ornithinolytica, and more preferably from K. pneumoniae or K. oxytoca.

[0120] The problem underlying the present invention is solved in yet another aspect by a method for stimulating an immune response in an animal or human against a Klebsiella organism, comprising the step of administering to said animal or human an effective amount of the antigen, or an active fragment or an active variant thereof, as defined above, or the nucleic acid molecule as defined above or a vector as defined above, or an antibody as defined above, or a pharmaceutical composition as defined above, wherein the effective amount is suitable to stimulate the immune response in said animal or human.

[0121] In an embodiment of said method for stimulating an immune response in an animal or human against a Klebsiella organism the Klebsiella organism is selected from the group comprising K. pneumoniae including the three subspecies pneumoniae, ozaenae and rhinoscleromatis, K. oxytoca, K. planticola, K. terrigena, and K. ornithinolytica, and more preferably from K. pneumoniae or K. oxytoca.

[0122] It is within the present invention that the various methods and uses, respectively, where an antigen as defined in the present invention is used, can also be performed or practiced using a fragment of such antigen, preferably an active fragment thereof, or a variant of such antigen, preferably an active variant thereof, each as preferably described herein. It is also within the present invention that the various kinds of compounds disclosed herein as interacting with or targeting the antigen according to the present invention, can additionally or alternatively interact with or target the active fragment or the active variant of said antigen.

[0123] It is also within the present invention that each and any method in the practice of which an antibody is used, can, in principle, also be practiced when instead of the antibody the anticalines or the functional nucleic acids as defined herein are used, whereby it is preferred that such functional nucleic acid is selected from the group comprising aptamers and spiegelmers. This applies equally to the various uses of the present application.

[0124] In a preferred embodiment a fragment of an antigen as disclosed herein is a part of such antigen which exhibits at least one feature of such antigen. Preferably such feature is a feature selected from the group comprising suitability for the treatment of infections, immunization of an animal including human, and/or stimulation of an immune response in an animal including human.

[0125] It is also within the present invention that any disclosure made herein in relation to Klebsiella and more specifically K. pneumoniae is equally applicable to any Klebsiellae or Klebsiella species, whereby the Klebsiella species is preferably selected from the group comprising K. pneumoniae including the three subspecies pneumoniae, ozaenae and rhinoscleromatis, K. oxytoca, K. planticola, K. terrigena, and K. ornithinolytica, and more preferably from K. pneumoniae or K. oxytoca.

[0126] The terms “polypeptide”, “peptide”, “protein” or “antigen” are used interchangeably throughout the present specification and refer in a comprehensive manner to the antigen according to the present invention, including each and any variant, fragment, analogue or derivative thereof, particularly as described herein. Insofar, whenever the term polypeptide, peptide, protein or antigen is used herein, and if not explicitly stated otherwise, the respective disclosure is also made for or in relation to any antigen according to the present invention, including each and any variant, fragment, analogue or derivative thereof, particularly as described herein. Also it is to be understood that any use or aspect described in connection with any of the above mentioned compounds covered by the term polypeptide, peptide, protein or antigen according to the present invention shall be applicable also to each and any other of the above mentioned compounds covered by the term polypeptide, peptide, protein or antigen according to the present invention.

[0127] The present invention advantageously provides an efficient, relevant and comprehensive set of isolated nucleic acid molecules and antigens encoded by them, including the active fragments and the active variants thereof, using an antibody preparation from multiple human plasma pools and surface expression libraries derived from the genome of K. pneumoniae. Thus, the present invention fulfils a widely felt demand for K. pneumoniae antigens, vaccines, diagnostics and products useful in procedures for preparing antibodies and for identifying compounds effective against infections caused by pathogenic Klebsiellae, more preferably K. pneumoniae including the three subspecies pneumoniae, ozaenae and rhinoscleromatis, K. oxytoca, K. planticola, K. terrigena, and K. ornithinolytica, and most preferably from K. pneumoniae or K. oxytoca.

[0128] An effective vaccine should be composed of proteins or polypeptides, which are expressed by all strains and are able to induce high affinity, abundant antibodies against cell surface components of said pathogenic Klebsiellae, especially K. pneumoniae including the three subspecies pneumoniae, ozaenae and rhinoscleromatis, K. oxytoca, K. planticola, K. terrigena, and K. ornithinolytica, and more preferably from K. pneumoniae or K. oxytoca. The antibodies should be IgG1 and/or IgG3 for opsonization, and any IgG subtype for neutralisation of adherence and toxin action. A chemically defined vaccine must be definitely superior compared to a whole cell vaccine (attenuated or killed), since components of said pathogenic Klebsiellae, especially K. pneumoniae including the three subspecies pneumoniae, ozaenae and rhinoscleromatis, K. oxytoca, K. planticola, K. terrigena, and K. ornithinolytica, and more preferably from K. pneumoniae or K. oxytoca, which cross-react with human tissues or inhibit opsonization can be eliminated, and the individual polypeptides inducing protective antibodies and/or a protective immune response can be selected.

[0129] In a preferred embodiment of the present invention, the nucleic acid molecules exhibit 70% identity over their entire length to a nucleotide sequence set forth in Seq ID Nos 1 to 187 and Seq ID No 375. More preferred are nucleic acids that comprise a region that is at least 80% or at least 85% identical over their entire length to a nucleic acid molecule set forth in Seq ID Nos 1 to 187 and Seq ID No 375. In this regard, nucleic acid molecules, which are at least 90%, 91%, 92%, 93%, 94%, 95%, or 96% identical over their entire length to the same are particularly preferred. Furthermore, those with at least 97% are highly preferred, those with at least 98% and at least 99% are particularly highly preferred, with at least 99% or 99.5% being the more preferred, with 100% identity being especially preferred. Moreover, preferred embodiments in this respect are nucleic acids, which encode antigens or fragments thereof (polypeptides), which retain substantially the same biological function or activity as the mature polypeptide set forth in the Seq ID Nos 188 to 374 and Seq ID No 376. It is also within the present invention that the nucleic acid molecules according to the present invention are coding for a protein which is preferably an antigen. Still further it is within the present invention, that the molecules defined by Seq ID Nos 188 to 374 and Seq ID No 376 are proteins, which are preferably antigens.

[0130] Identity, as known in the art and used herein, is the relationship between two or more polypeptide sequences or two or more polynucleotide sequences, as determined by comparing the sequences. In the art, identity also means the degree of sequence relatedness between polypeptide or polynucleotide sequences, as the case may be, as determined by the match between strings of such sequences. Identity can be readily calculated. While there exist a number of methods to measure identity between two polynucleotide or two polypeptide sequences, the term is well known to skilled artisans (e.g. Sequence Analysis in Molecular Biology, von Heinje, G., Academic Press, 1987). Preferred methods to determine identity are designed to give the largest match between the sequences tested. Methods to determine identity are codified in computer programs. Preferred computer program methods to determine identity between two sequences include, but are not limited to, GCG program package (Devereux, J. et al., 1984), BLASTP, BLASTN, and FASTA (Altschul, S. et al., 1990).

[0131] As a second alternative to the nucleic acid molecules described herein by reference to Seq ID Nos 1-187 and Seq ID No 375, the description of which is also referred to herein as first alternative, the nucleic acid molecules according to the present invention can also be nucleic acid molecules, which are at least essentially complementary to the nucleic acids described in accordance with the first alternative herein. It will be acknowledged by the ones skilled in the art that an individual nucleic acid molecule is at least essentially complementary to another individual nucleic acid molecule. As used herein complementary means that a nucleic acid strand is base pairing via Watson-Crick base pairing with a second nucleic acid strand. Essentially complementary as used herein means that the base pairing is not occurring for all of the bases of the respective strands but leaves a certain number or percentage of the bases unpaired or wrongly paired. The percentage of correctly pairing bases is preferably at least 70%, more preferably 80%, even more preferably 90% and most preferably any percentage higher than 90%. Such higher percentage includes 91, 92, 93, 94, 95, 96, 97, 98, 99 and 100%, whereby such definition is applicable to each aspect of the present application where this kind of terminology is used. It is to be noted that a percentage of 70% matching bases is considered as homology and the hybridisation having this extent of matching base pairs is considered as stringent. Hybridisation conditions for this kind of stringent hybridisation may be taken from Current Protocols in Molecular Biology (John Wiley and Sons, Inc., 1987). More particularly, the hybridisation conditions can be as follows:
[0132] Hybridisation performed e.g. in 5×SSPE, 5×Denhardt's reagent, 0.1% SDS, 100 g/mL sheared DNA at 68° C.
[0133] Moderate stringency wash in 0.2×SSC, 0.1% SDS at 42° C.
[0134] High stringency wash in 0.1×SSC, 0.1% SDS at 68° C.

[0135] Genomic DNA with a GC content of 50% has an approximate T_{M} of 96° C. For 1% mismatch, the T_{M} is reduced by approximately 1° C.

[0136] In addition, any of the further hybridisation conditions described herein are in principle applicable as well.

[0137] Of course, all nucleic acid sequence molecules which encode the same polypeptide molecule as those identified by the present invention are encompassed by any disclosure of a given coding sequence, since the degeneracy of the genetic code is directly applicable to unambiguously determine all possible nucleic acid molecules which encode a given polypeptide molecule, even if the number of such degenerated nucleic acid molecules may be high. This is also applicable for active fragments or active variants of a given antigen, as long as the fragments or variants encode an antigen being suitable to be used such that the same effect can be obtained as if the full-length antigen was used. Preferably, such antigens or active fragments or active variants thereof may be used in a vaccination application, e.g. as an active or passive vaccine.

[0138] As a third alternative, the nucleic acid molecule according to the present invention can also be a nucleic acid which comprises a stretch of at least 15 bases of the nucleic acid molecule according to the first or second alternative of the nucleic acid molecules according to the present invention as outlined above. Preferably, the bases form a contiguous stretch of bases. However, it is also within the scope of the present invention that the stretch consists of two or more moieties, which are separated by a number of bases.

[0139] The nucleic acid molecules according to the present invention may preferably consist of at least 20, even more preferred at least 30, especially at least 50 contiguous bases from the sequences disclosed herein. The suitable length may easily be optimised due to the intended field of use (e.g. as (PCR) primers, probes, capture molecules (e.g. on a (DNA) chip), etc.). Preferred nucleic acid molecules contain at least a contiguous 15 base portion of one or more of the immunogenic amino acid sequences listed in Tables 1 and 4. Specifically preferred are nucleic acids containing a contiguous portion of a DNA sequence of any sequence contained in the sequence protocol of the present application which shows 1 or more, preferably more than 2, especially more than 5, non-identical nucleic acid residues compared to the unfinished genome sequences of K. pneumoniae MGH78578 and Kp342 that are available (http://www.ncbi.nlm.nih.gov/genomes/lproks.cgi, or http://pedant.gsf.de/, and http://cmr.tigr.org/) and plasmids as specified in the following by their accession numbers K. pneumoniae plasmid pJHCMW1, NC_{—}003486, K. pneumoniae plasmid pIP843, NC_{—}005015, K. pneumoniae plasmid pK2044, NC_{—}006625, K. pneumoniae plasmid pKlebB-k17-80, NC_{—}002610, K. pneumoniae plasmid pKPN2, NC_{—}005018, K. pneumoniae plasmid pLVPK, NC_{—}005249, Klebsiella sp. KCL-2 plasmid pMGD2, NC_{—}003789. However, the unfinished genome sequences mentioned above are subject to continuous resequencing, corrections, amendments and additions. For example, as of April 2007 the sequence available at http://cmr.tigr.org/ is in status 7 out of 9 status codes, which means that additional sequences generated for gap closure have been assembled and added to data release (http://www.tigr.org/tdb/mdb/mdbinprogress.html). Specifically preferred non-identical nucleic acid residues are residues, which lead to a non-identical amino acid residue. Preferably, the nucleic acid sequences encode polypeptides, proteins, or antigens having at least 1, preferably at least 2, preferably at least 3 different amino acid residues compared to the published or listed K. pneumoniae counterparts mentioned above. Preferably, this kind of polypeptides, proteins, or antigens still has at least one of the characteristics of the molecules disclosed herein having identical amino acid residues. Also preferred are such isolated polypeptides, which are fragments of the proteins or of the antigens disclosed herein, e.g. in the Sequence Listing, having at least 6, 7, or 8 amino acid residues and being encoded by the nucleic acids as described herein.

[0140] The nucleic acid molecule according to the present invention can, as a fourth alternative, also be a nucleic acid molecule which anneals under stringent hybridisation conditions to any of the nucleic acids of the present invention according to the first, second, or third alternative as disclosed herein. Stringent hybridisation conditions are typically those described herein.

[0141] Finally, the nucleic acid molecule according to the present invention can, as a fifth alternative, also be a nucleic acid molecule which, but for the degeneracy of the genetic code, would hybridise to any of the nucleic acid molecules of the present invention according to the first, second, third, and fourth alternative as outlined herein. This kind of nucleic acid molecule refers to the fact that preferably the nucleic acids according to the present invention code for the antigen, or fragments or variants thereof, according to the present invention. This kind of nucleic acid molecule is particularly useful in the detection of a nucleic acid molecule according to the present invention and thus the diagnosis of the respective microorganisms such as K. pneumoniae or any pathogenic Klebsiellae, particularly those pathogenic Klebsiella species disclosed herein, and any disease or diseased condition where these kinds of microorganism are involved. Preferably, such microorganism, especially an opportunistic microorganism, is causing such disease directly or indirectly. Preferably, the hybridisation could occur or be preformed under stringent conditions as described in connection with the fourth alternative described herein.

[0142] Nucleic acid molecule as used herein generally refers to any ribonucleic acid molecule or deoxyribonucleic acid molecule, which may be unmodified RNA or DNA or modified RNA or DNA. Thus, for instance, nucleic acid molecule as used herein refers to, among others, single- and double-stranded DNA, DNA that is a mixture of single- and double-stranded RNA, and RNA that is a mixture of single- and double-stranded regions, hybrid molecules comprising DNA and RNA that may be single-stranded or, more typically, double-stranded, or triple-stranded, or a mixture of single- and double-stranded regions. In addition, nucleic acid molecule as used herein refers to triple-stranded regions comprising RNA or DNA or both RNA and DNA. The strands in such regions may be from the same molecule or from different molecules. The regions may be derived from one or more of the molecules, but more typically involve only a region of some of the molecules. One of the molecules of a triple-helical region often is an oligonucleotide. As used herein, the term nucleic acid molecule includes DNAs or RNAs as described above that contain one or more modified bases. Thus, DNAs or RNAs with backbones modified for stability or for other reasons are “nucleic acid molecule” as that term is intended herein. Moreover, DNAs or RNAs comprising unusual bases, such as inosine, or modified bases, such as tritylated bases, to name just two examples, are nucleic acid molecule as the term is used herein. It will be appreciated that a great variety of modifications can be made to DNA and RNA that serve many useful purposes known to those of skill in the art. The term nucleic acid molecule as it is employed herein embraces such chemically, enzymatically or metabolically modified forms of nucleic acid molecule, as well as the chemical forms of DNA and RNA characteristic of viruses and cells, including simple and complex cells, inter alia. The term nucleic acid molecule also embraces short nucleic acid molecules often referred to as oligonucleotide(s). “Polynucleotide” and “nucleic acid” or “nucleic acid molecule” are often used interchangeably herein.

[0143] Nucleic acid molecules provided in the present invention also encompass numerous unique fragments, both longer and shorter than the nucleic acid molecule sequences set forth in the sequencing listing of the present application, more specifically of the K. pneumoniae coding regions, which can be generated by standard cloning methods. To be unique, a fragment must be of sufficient size to distinguish it from other known nucleic acid sequences, most readily determined by comparing any selected K. pneumoniae fragment to the nucleotide sequences in biosequence databases such as GenBank. It will be appreciated by the one skilled in the art that what is said herein in any aspect in relation to K. pneumoniae applies equally to any of the other Klebsiella species described herein, more preferably any pathogenic Klebsiella species described herein.

[0144] Additionally, modifications can be made to the nucleic acid molecules and polypeptides that are encompassed by the present invention. For example, the nucleic acid also includes sequences that are a result of the degeneration of the genetic code. There are 20 natural amino acids, most of which are specified by more than one codon. Thus, nucleotide substitutions can be made which do not affect the polypeptide encoded by the nucleic acid. Accordingly, any nucleic acid molecule which encodes an antigen or fragments thereof is encompassed by the present invention.

[0145] Furthermore, any of the nucleic acid molecules encoding antigens or fragments thereof provided by the present invention can be functionally linked, using standard techniques such as standard cloning techniques, to any desired regulatory sequences, whether an K. pneumoniae regulatory sequence or a heterologous regulatory sequence, heterologous leader sequence, heterologous marker sequence or a heterologous coding sequence to create a fusion protein.

[0146] Nucleic acid molecules of the present invention may be in the form of RNA, such as mRNA or cRNA, or in the form of DNA, including, for instance, cDNA and genomic DNA obtained by cloning or produced by chemical synthetic techniques or by a combination thereof. The DNA may be triple-stranded, double-stranded or single-stranded. Single-stranded DNA may be the coding strand, also known as the sense strand, or it may be the non-coding strand, also referred to as the anti-sense strand.

[0147] The present invention further relates to variants of the nucleic acid molecules described herein which encode fragments, analogs and derivatives of the antigens and fragments thereof having a deducted K. pneumoniae amino acid sequence set forth in the Sequence Listing. A variant of the nucleic acid molecule may be a naturally occurring variant such as a naturally occurring allelic variant, or it may be a variant that is not known to occur naturally. Such non-naturally occurring variants of the nucleic acid molecule may be made by mutagenesis techniques, including those applied to nucleic acid molecules, cells or organisms.

[0148] Among variants in this regard are variants that differ from the aforementioned nucleic acid molecules by nucleotide substitutions, deletions or additions. The substitutions, deletions or additions may involve one or more nucleotides. The variants may be altered in coding or non-coding regions or both. Alterations in the coding regions may produce conservative or non-conservative amino acid substitutions, deletions or additions. Preferred are nucleic acid molecules encoding a variant, analog, derivative or fragment, or a variant, analogue or derivative of a fragment, which have an K. pneumoniae sequence as set forth in the Sequence Listing, in which several, a few, 5 to 10, 1 to 5, 1 to 3, 2, 1 or no amino acid(s) is substituted, deleted or added, in any combination. Especially preferred among these are silent substitutions, additions and deletions, which do not alter the properties and activities of the K. pneumoniae polypeptides set forth in the Sequence Listing. Also especially preferred in this regard are conservative substitutions.

[0149] The nucleic acid molecules of the present invention may also be used as a hybridisation probe for, e.g., RNA, cDNA and genomic DNA to isolate full-length cDNAs and genomic clones encoding polypeptides of the present invention and to isolate cDNA and genomic clones of other genes that have a high sequence similarity to the nucleic acid molecules of the present invention. Such probes generally will comprise at least 15 bases. Preferably, such probes will have at least 20, at least 25 or at least 30 bases, and may have at least 50 bases. Particularly preferred probes will have at least 30 bases, and will have 50 bases or less, such as 30, 35, 40, 45, or 50 bases.

[0150] For example, the coding region of a nucleic acid molecule of the present invention may be isolated by screening a relevant library using the known DNA sequence to synthesize an oligonucleotide probe. A labelled oligonucleotide having a sequence complementary to that of a gene of the present invention is then used to screen a library of cDNA, genomic DNA or mRNA to determine to which members of the library the probe hybridizes.

[0151] The nucleic acid molecules and polypeptides of the present invention may be employed as reagents and materials for the development or preparation of pharmaceutical compositions and/or diagnostics for diseases, particularly human disease, as further discussed herein.

[0152] The nucleic acid molecules of the present invention that are oligonucleotides can be used in the processes herein as described, but preferably for PCR, to determine whether or not the K. pneumoniae genes identified herein in whole or in part are present and/or transcribed in infected tissue such as skin, synovia or blood. It is recognized that such sequences will also have utility in diagnosis of the stage of infection and type of infection the pathogen has attained. For this and other purposes arrays which are known as such in the art, comprising at least one of the nucleic acids or polypeptides according to the present invention as described herein, may be used.

[0153] The nucleic acid molecules according to the present invention may be used for the detection of nucleic acid molecules and organisms or samples containing these nucleic acids. Preferably such detection is for diagnosis, more preferably for the diagnosis of a disease related or linked to the presence or abundance of Klebsiellae or any other pathogen species of Klebsiella, especially K. pneumoniae including the three subspecies pneumoniae, ozaenae and rhinoscleromatis, K. oxytoca, K. planticola, K. terrigena, and K. ornithinolytica, and more preferably from K. pneumoniae or K. oxytoca.

[0154] Eukaryotes (herein also “individual(s)”), particularly mammals, and especially humans, infected with Klebsiellae or any other pathogen species of Klebsiella, especially K. pneumoniae including the three subspecies pneumoniae, ozaenae and rhinoscleromatis, K. oxytoca, K. planticola, K. terrigena, and K. ornithinolytica, and more preferably from K. pneumoniae or K. oxytoca can be identified by detecting any of the nucleic acid molecules according to the present invention detected at the DNA level by a variety of techniques. Preferred nucleic acid molecule candidates for distinguishing Klebsiellae or said other pathogenic Klebsiella from other organisms can be obtained.

[0155] The invention provides a process for diagnosing disease, arising from infection with Klebsiellae or any other pathogen species of Klebsiella, especially K. pneumoniae including the three subspecies pneumoniae, ozaenae and rhinoscleromatis, K. oxytoca, K. planticola, K. terrigena, and K. ornithinolytica, and more preferably from K. pneumoniae or K. oxytoca, comprising determining from a sample isolated or derived from an individual an increased level of expression of a nucleic acid molecule having the sequence of a nucleic acid molecule as disclosed herein and more preferably set forth in the Sequence Listing. Expression of nucleic acid molecules can be measured using any one of the methods well known in the art for the quantification of nucleic acid molecules, such as, for example, PCR, RT-PCR, RNase protection, Northern blotting, other hybridisation methods and the arrays described herein.

[0156] Isolated as used herein means separated “by the hand of man” from its natural state; i.e., that, if it occurs in nature, it has been changed or removed from its original environment, or both. For example, a naturally occurring nucleic acid molecule or a polypeptide naturally present in a living organism in its natural state is not “isolated”, but the same nucleic acid molecule or polypeptide separated from the coexisting materials of its natural state is “isolated”, as the term is employed herein. As part of or following isolation, such nucleic acid molecules can be joined to other nucleic acid molecules, such as DNAs, for mutagenesis, to form fusion proteins, and for propagation or expression in a host, for instance. The isolated nucleic acid molecules, alone or joined to other nucleic acid molecules such as vectors, can be introduced into host cells, in culture or in whole organisms. Introduced into host cells in culture or in whole organisms, such DNAs still would be isolated, as the term is used herein, because they would not be in their naturally occurring form or environment. Similarly, the nucleic acid molecules and polypeptides may occur in a composition, such as a media formulations, solutions for introduction of nucleic acid molecules or polypeptides, for example, into cells, compositions or solutions for chemical or enzymatic reactions, for instance, which are not naturally occurring compositions, and, therein remain isolated nucleic acid molecules or polypeptides within the meaning of that term as it is employed herein.

[0157] The nucleic acid molecules of the present invention may be originally formed in vitro, e.g. by chemical synthesis, or in a cell culture and subsequent isolation or purification. In general, the nucleic acids may be obtained by the manipulation of nucleic acids by endonucleases and/or exonucleases and/or polymerases and/or ligases and/or recombinases or other methods known to the skilled practitioner to produce the nucleic acids.

[0158] The nucleic acid sequences as defined by Seq ID Nos 1 to 187 and Seq ID No 375 start with the first complete codon comprised by the fragment as inserted into the vector and encodes the first amino acid as defined by Seq ID Nos 188 to 374 and Seq ID No 376. However, for the recombinant production additional nucleic acids might be useful or necessary to facilitate the cloning and expression.

[0159] Preferably, the nucleic acids can be isolated from Klebsiellae or any other pathogen species of Klebsiella, especially K. pneumoniae including the three subspecies pneumoniae, ozaenae and rhinoscleromatis, K. oxytoca, K. planticola, K. terrigena, and K. ornithinolytica, and more preferably from K. pneumoniae or K. oxytoca by methods known to the one skilled in the art. The same applies to the polypeptides according to the present invention.

[0160] The present invention also relates to vectors, which comprise a nucleic acid molecule or nucleic acid molecules of the present invention. A vector may additionally include nucleic acid sequences that permit it to replicate in the host cell, such as an origin of replication, one or more therapeutic genes and/or selectable marker genes and other genetic elements known in the art such as regulatory elements directing transcription, translation and/or secretion of the encoded protein. The vector may be used to transduce, transform or infect a cell, thereby causing the cell to express nucleic acids and/or proteins other than those native to the cell. The vector optionally includes materials to aid in achieving entry of the nucleic acid into the cell, such as a viral particle, liposome, protein coating or the like.

[0161] The present invention also relates to host cells, which are genetically engineered with vectors of the invention and to the production of the polypeptides according to the present invention by recombinant techniques.

[0162] A great variety of expression vectors can be used to express the polypeptides according to the present invention. Generally, any vector suitable to maintain, propagate or express nucleic acids to express a polypeptide in a host may be used for expression in this regard. In accordance with this aspect of the invention the vector may be, for example, a plasmid vector, a single or double-stranded phage vector, a single or double-stranded RNA or DNA viral vector. Starting plasmids disclosed herein are either commercially available, publicly available, or can be constructed from available plasmids by routine application of well-known, published procedures. Preferred among vectors, in certain respects, are those for expression of nucleic acid molecules and the polypeptides according to the present invention. Nucleic acid constructs in host cells can be used in a conventional manner to produce the gene product encoded by the recombinant sequence. Alternatively, the polypeptides according to the preset invention can be synthetically produced by conventional peptide synthesizers. Mature proteins can be expressed in mammalian cells, yeast, bacteria, or other cells under the control of appropriate promoters. Cell-free translation systems can also be employed to produce such proteins using RNAs derived from the DNA construct of the present invention.

[0163] Host cells can be genetically engineered to incorporate nucleic acid molecules and express nucleic acid molecules of the present invention. Representative examples of appropriate hosts include bacterial cells, such as streptococci, staphylococci, E. coli, Streptomyces and Bacillus subtilis cells; fungal cells, such as yeast cells and Aspergillus cells; insect cells such as Drosophila S2 and Spodoptera Sf9 cells; animal cells such as CHO, COS, HeLa, C127, 3T3, BHK, 293 and Bowes melanoma cells; and plant cells.

[0164] The host cells can be transfected, e.g. by conventional means such as electroporation with at least one expression vector containing a nucleic acid of the invention under the control of a transcriptional regulatory sequence.

[0165] According to another aspect of the present invention, a comprehensive set of novel polypeptides is provided. Such polypeptides, as mentioned previously herein, are antigens as disclosed herein, and the fragments thereof, preferably the active fragments thereof, and the variants thereof, preferably the active variants thereof. Preferably, the polypeptides according to the present invention are antigens and fragments thereof. In a preferred embodiment of the invention, an antigen comprising an amino acid sequence being preferably encoded by any one of the nucleic acids molecules and fragments thereof as described herein, are provided. In another preferred embodiment of the invention a novel set of proteins and antigens and active fragments as well as active variants thereof is provided which comprise amino acid sequences selected from the group comprising Seq ID Nos 188 to 374 and Seq ID No 376.

[0166] The polypeptides according to the present invention, i.e. the antigens, as provided by the present invention preferably include any polypeptide or molecule set forth in the Sequence Listing as well as polypeptides which have at least 70% identity to such polypeptide according to the present invention, preferably at least 80% or 85% identity to such polypeptide according to the present invention, and more preferably at least 90% similarity (more preferably at least 90% identity) to such polypeptide according to the present invention and more preferably as set forth in the Sequence Listing and still more preferably at least 95%, 96%, 97%, 98%, 99% or 99.5% similarity (still more preferably at least 95%, 96%, 97%, 98%, 99%, or 99.5% identity) to such polypeptide according to the present invention and also include portions of such polypeptides with such portion of the polypeptide generally containing at least 4 amino acids and more preferably at least 8, still more preferably at least 30, still more preferably at most 50 amino acids, such as 4, 8, 10, 20, 30, 35, 40, 45 or 50 amino acids. In a preferred embodiment such portions are active fragments of the polypeptides according to the present invention.

[0167] The invention also relates to fragments, analogs, and derivatives of the polypeptides according to the present invention. The terms “fragment”, “derivative” and “analog” when referring to such polypeptide whose amino acid sequence is preferably set forth in the Sequence Listing, means a polypeptide which retains essentially the same or a similar biological activity as such polypeptide. It will be acknowledged by the ones skilled in the art that the meaning of the term “similar biological activity” as used herein preferably depends on the polypeptide under consideration and more specifically its function. The term “biological activity” as used herein is further defined below. More preferably, a similar biological function or activity differs from the function of the non-fragment or the non-derivative in terms of extent of activity, affinity, immunogenicity, stability and/or specificity. In a preferred embodiment the difference is less than 50%, less than 75% or less than 90%.

[0168] In an embodiment the fragment, derivative, variant or analog of a polypeptide according to the present invention is 1) one in which one or more of the amino acid residues are substituted with a conserved or non-conserved amino acid residue (preferably a conserved amino acid residue) and such substituted amino acid residue may or may not be one encoded by the genetic code, or 2) one in which one or more of the amino acid residues includes a substituent group, or 3) one in the polypeptide according to the present invention or a fragment thereof is fused with another compound, such as a compound to increase the half-life of the polypeptide according to the present invention or a fragment thereof such as, for example, polyethylene glycol, or 4) one in which the additional amino acids are fused to the polypeptide according to the present invention or a fragment thereof, such as a leader or secretory sequence or a sequence which is employed for purification of said polypeptide according to the present invention or fragment thereof or a proprotein sequence. Such fragments, derivatives, variants and analogs are deemed to be within the scope of those skilled in the art from the teachings herein.

[0169] The present invention also relates to proteins and antigens of different Klebsiella species, preferably pathogenic Klebsiella species, especially K. pneumoniae including the three subspecies pneumoniae, ozaenae and rhinoscleromatis, K. oxytoca, K. planticola, K. terrigena, and K. ornithinolytica, and more preferably from K. pneumoniae or K. oxytoca which are preferably homologues. Such homologues may easily be isolated based on the nucleic acid and amino acid sequences disclosed herein. There are multiple serotypes or clinical strains distinguished to date for each of the pathogens and the typing is based on serotype specific antisera or molecular approaches. The presence of any antigen can accordingly be determined for every serotype. The contribution of the various serotypes to the different Klebsiella infections varies in different age groups and especially geographical regions. Particularly relevant serotypes of Klebsiella are, for example, K1, K2, K3, K10, K21, K22, K30, K55, K64, O1, O2a, O3, O4, O5, or O12, or any combination of said K and said O serotypes. It is an important aspect that the most valuable protective antigens need to be conserved among various clinical strains.

[0170] Additionally, fusion polypeptides comprising such antigens, variants, analogs, derivatives and fragments thereof, and variants, analogs and derivatives of the fragments are also encompassed by the present invention. Such fusion polypeptides and proteins, as well as nucleic acid molecules encoding them, can readily be made using standard techniques, including standard recombinant techniques for producing and expression of a recombinant polynucleic acid encoding a fusion protein.

[0171] Among preferred variants are those that vary from a reference by conservative amino acid substitutions. Such substitutions are those that substitute a given amino acid in a polypeptide according to the present invention by another amino acid of like characteristics. Typically seen as conservative substitutions are the replacements, one for another, among the aliphatic amino acids Ala, Val, Leu and Ile; interchange of the hydroxyl residues Ser and Thr, exchange of the acidic residues Asp and Glu, substitution between the amide residues Asn and Gln, exchange of the basic residues Lys and Arg and replacements among the aromatic residues Phe and Tyr.

[0172] In another embodiment of the invention the peptide as defined above may be modified by a variety of chemical techniques to produce derivatives having essentially the same activity (as defined above for fragments and variants) as the modified peptides, and optionally having other desirable properties. For example, carboxylic acid groups of the protein, whether C-terminal or side chain, may be provided in the form of a salt of a pharmaceutically acceptable cation or esterified to form an ester, or converted to an amide. Amino groups of the peptide, whether amino-terminal or side chain, may be in the form of a pharmaceutically-acceptable acid addition salt, such as the HCl, HBr, acetic, benzoic, toluene sulfonic, maleic, tartaric and other organic salts, or may be converted to an amide. Hydroxyl groups of the peptide side chains may be converted to alkoxy or to an ester using well recognized techniques. Phenyl and phenolic rings of the peptide side chains may be substituted with one or more halogen atoms, such as fluorine, chlorine, bromine or iodine, or with alkyl, alkoxy, carboxylic acids and esters thereof, or amides of such carboxylic acids. Thiols can be protected with any one of a number of well recognized protecting groups, such as acetamide groups.

[0173] Further particularly preferred in this regard are variants, analogs, derivatives and fragments, and variants, analogs and derivatives of the fragments, having the amino acid sequence of any polypeptide according to the present invention as disclosed herein and preferably set forth in the Sequence Listing, in which several, a few, 5 to 10, 1 to 5, 1 to 3, 2, 1 or no amino acid residues are substituted, deleted or added, in any combination. Especially preferred among these are silent substitutions, additions and deletions, which do not alter the properties and activities of the peptide of the present invention. Also especially preferred in this regard are conservative substitutions. Most highly preferred are peptides having an amino acid sequence set forth in the Sequence Listing without substitutions.

[0174] Variants of any of the antigens in their various embodiments disclosed herein and in particular the antigens and peptides specified herein by Seq ID Nos 188 to 374 and Seq ID No 376, can typically also be characterized by means of bioinformatics. Respective tools such as the NCBI Basic Local Alignment Search Tool (BLAST) (Altschul et al., 1990) are available from several sources, including the National Center for Biotechnology Information (NCBI, Bethesda, Md.) and on the Internet, for use in connection with the sequence analysis programs blastp, blastn, blastx, tblastn and tblastx. Using the NCBI Blast 2.0, gapped blastp set to default parameters. For comparisons of amino acid sequences of at least 35 amino acids, the Blast 2 sequences function is employed using the default BLOSUM62 matrix set to default parameters, (gap existence cost of 11, and a per residue gap cost of 1). When aligning short peptides (fewer than around 35 amino acids), the alignment is performed using the Blast 2 sequences function, employing the PAM30 matrix set to default parameters (open gap 9, extension gap 1 penalties). Methods for determining sequence identity over such short windows such as 15 amino acids or less are described at the website that is maintained by the National Center for Biotechnology Information in Bethesda, Md. (http://www.ncbi.nlm.nih.gov/BLAST/).

[0175] The active variant of an antigen is obtained by sequence alterations in the antigen, including each and any variant, fragment, analogue or derivative thereof, if not explicitly indicated to the contrary, wherein the polypeptide according to the present invention with the sequence alterations retains a function of the unaltered polypeptide according to the present invention, e.g. having a biological activity similar to that displayed by the complete antigen, including the ability to induce an immune response and/or to show protection against a Klebsiella organism e.g. in a sepsis and/or lethality model. A further example of retaining the function of the unaltered polypeptide according to the present invention is that the active variant of the antigen specifically binds a polypeptide specific antibody that binds an unaltered form of the polypeptide according to the present invention. By “biological function” or “biological activity” is preferably meant a function of the polypeptide in cells or organisms in which it naturally occurs, even if the function is not necessary for the growth or survival of the cells and organisms, respectively. For example, the biological function of a porin is to allow the entry into cell of compounds present in the extracellular medium. The biological function is distinct from the antigenic function. A polypeptide according to the present invention can have more than one biological function.

[0176] The sequence alterations of such variants can include, but are not limited to, conservative substitutions, deletions, mutations and insertions. Preferably, the active variant exhibits reactivity with human sera of septicaemia patients, more preferably mediates seroconversion and most preferably shows bactericidal activity. These characteristics of the active variant can be assessed e.g. as detailed in the Examples. In the context of the present invention a variant specifically binds a specific antibody (preferably being polyclonal antibodies raised against recombinant proteins in animals such as mouse, rabbit or monoclonal antibodies generated in mouse), exhibits reactivity with human sera from patients with septicaemia, mediates seroconversion or shows bactericidal activity, if the activity of the variant amounts to at least 10%, preferably at least 25%, more preferably at least 50%, even more preferably at least 70%, still more preferably at least 80%, especially at least 90%, particularly at least 95%, most preferably at least 99% of the activity of the antigen without sequence alterations.

[0177] Said active variants include naturally-occurring allelic variants, as well as mutants or any other non-naturally occurring variants. As is known in the art, an allelic variant is an alternate form of a (poly)peptide that is characterized as having a substitution, deletion, or addition of one or more amino acids that does essentially not alter the biological function of the polypeptide, as it is described above.

[0178] Within any species of the living world, allelic variation is the rule. For example, any bacterial species, e.g. K. pneumoniae, is usually represented by a variety of strains (characterized by clonal reproduction) that differ from each other by minor allelic variations. Indeed, a polypeptide that fulfils the same biological function in different strains can have an amino acid sequence that is not identical in each of the strains. Such an allelic variation is equally reflected at the polynucleotide level.

[0179] Allelic variation is very common within the Klebsiella species as described for class A beta-lactamase K2 (Haeggman, S. et al., 1997).

[0180] In a preferred embodiment, the active variant of or the active fragment derived from the polypeptide according to the present invention by amino acid exchanges, deletions or insertions may also conserve, or more preferably improve, the activity (reactivity, seroconversion and/or bactericidal activity as defined herein). Furthermore, these polypeptides may also cover epitopes, which trigger the same or preferably an improved T cell response. These epitopes are referred to as “heteroclitic” as further defined herein. They have a similar or preferably greater affinity to MHC/HLA molecules, and the ability to stimulate the T cell receptors (TCR) directed to the original epitope in a similar or preferably stronger manner. Heteroclitic epitopes can be obtained by rational design i.e. taking into account the contribution of individual residues to binding to MHC/HLA as for instance described by Rammensee et al. (1999), combined with a systematic exchange of residues potentially interacting with the TCR and testing the resulting sequences with T cells directed against the original epitope. Such a design is possible for a skilled person in the art without undue experimentation.

[0181] In a still more preferred embodiment of the invention the active variant of a polypeptide according to the present invention is any of the polypeptides disclosed herein and more specifically any of the polypeptides defined by the Seq ID Nos 188 to 374 and Seq ID No 376, having at least 50% sequence identity to the polypeptides of any of said Seq ID Nos 188 to 374 and Seq ID No 376, especially at least 60%, preferably at least 70%, more preferably at least 80%, still more preferably at least 90%, even more preferably at least 95%, 96%, 97%, 98%, most preferably 99% sequence identity to the polypeptides of any of said Seq ID Nos 188 to 374 and Seq ID No 376 and/or is derived from said polypeptides of any of the sequences of Seq ID Nos 188 to 374 and Seq ID No 376 by conservative substitutions. Conservative substitutions are those that take place within a family of amino acids that are related in their side chains and chemical properties. Examples of such families are amino acids with basic side chains, with acidic side chains, with non-polar aliphatic side chains, with non-polar aromatic side chains, with uncharged polar side chains, with small side chains, with large side chains etc. In one embodiment, one conservative substitution is included in the peptide. In another embodiment, two conservative substitutions or less are included in the peptide. In a further embodiment, three conservative substitutions or less are included in the peptide.

[0182] Examples of conservative amino acid substitutions include, but are not limited to, those listed below:

| Original | Conservative |
|---|---|
| Residue | Substitutions |
| Ala | Ser |
| Arg | Lys |
| Asn | Gln; His |
| Asp | Glu |
| Cys | Ser |
| Gln | Asn |
| Glu | Asp |
| His | Asn; Gln |
| Ile | Leu; Val |
| Leu | Ile; Val |
| Lys | Arg; Gln; Asn |
| Met | Leu; Ile |
| Phe | Met; Leu; Tyr |
| Ser | Thr |
| Thr | Ser |
| Trp | Tyr |
| Tyr | Trp; Phe |
| Val | Ile; Leu |

[0183] The polypeptides according to the present invention, and fragments and variants thereof, also include or consist of modified epitopes wherein preferably one or two of the amino acids of a given epitope are modified or replaced according to the rules disclosed in, e.g., Tourdot, S. et al., 2000, as well as the nucleic acid sequences encoding such modified epitopes. The epitopes as presented by the polypeptides according to the present invention are also referred to herein as the present epitopes.

[0184] It is clear that also epitopes derived from the present epitopes by amino acid exchanges improving, conserving or at least not significantly impeding the T cell activating capability of the epitopes are covered by the epitopes according to the present invention. Therefore the present epitopes also cover epitopes, which do not contain the original sequence as derived from K. pneumoniae, but trigger the same or preferably an improved T cell response. These epitope are referred to as “heteroclitic”; they need to have a similar or preferably greater affinity to MHC/HLA molecules, and the need the ability to stimulate the T cell receptors (TCR) directed to the original epitope in a similar or preferably stronger manner.

[0185] Another possibility for identifying epitopes and more specifically heteroclitic epitopes includes the screening of peptide libraries with T cells directed against one or several of the present epitopes. A preferred way is the positional scanning of synthetic peptide libraries. Such approaches have been described in detail for instance by Hemmer, B. et al., (1999) and the references given therein.

[0186] As an alternative to epitopes represented by the present derived amino acid sequences or heteroclitic epitopes as disclosed herein, also substances or compounds mimicking these epitopes which are also referred to herein as “peptidemimetica” or “retro-inverse-peptides” can be applied and are thus within the present invention.

[0187] Another aspect of the design of improved epitopes is their formulation or modification with substances increasing their capacity to stimulate T cells. These include T helper cell epitopes, lipids or liposomes or preferred modifications as described in WO 01/78767.

[0188] Another way to increase the T cell stimulating capacity of epitopes is their formulation with immune stimulating substances for instance cytokines or chemokines like interleukin-2, -7, -12, -18, class I and II interferons (IFN), especially IFN-gamma, GM-CSF, TNF-alpha, flt3-ligand and others.

[0189] The polypeptides according to the present invention are preferably provided in an isolated form, and preferably are purified to homogeneity.

[0190] In another embodiment of the present invention the variant is a fragment. The fragment is characterized by being derived from the antigen as defined above by one or more amino acid deletions. The deletion(s) may be C-terminally, N-terminally and/or internally. Preferably the fragment is obtained by at most 10, 20, 30, 40, 50, 60, 80, 100, 150 or 200, more preferably by at most 10, 20, 30, 40 or 50, even more preferably at most 5, 10 or 15, still more preferably at most 5 or 10, most preferably 1, 2, 3, 4 or 5 deletion(s). The active fragment of the invention is characterized by having a biological activity similar to that displayed by the complete antigen, including the ability to induce immunization and/or to show protection against Klebsiella e.g. in a sepsis and/or lethality model. The fragment of an antigen is active in the context of the present invention, if the activity of the fragment amounts to at least 10%, preferably at least 25%, more preferably at least 50%, even more preferably at least 70%, still more preferably at least 80%, especially at least 90%, particularly at least 95%, most preferably at least 99% of the activity of the antigen without sequence alteration. These fragments may be designed or obtained in any desired length, including as small as about 50 to 80 amino acids in length.

[0191] In a further embodiment a fragment, and more preferably a fragment, of the polypeptide according to the present invention are characterised by structural or functional attributes, i.e. fragments that comprise alpha-helix and alpha-helix forming regions, beta-sheet and beta-sheet forming regions, turn and turn-forming regions, coil and coil-forming regions, hydrophilic regions, hydrophobic regions, alpha-amphipathic regions, beta-amphipathic regions, flexible regions, surface-forming regions, substrate binding regions, and high antigenic index regions of the polypeptide according to the present invention, and combinations of such fragments. Preferred regions are those that mediate antigenicity and antibody binding activities of the polypeptides according to the present invention. Most highly preferred in this regard are fragments that have a chemical, biological or other activity of the antigen and fragments thereof of the present invention, including those with a similar activity or an improved activity, whereby such improved activities are immunogenicity and stability, or with a decreased undesirable activity, whereby such decreased undesirable activity is enzymatic and toxic function and generation of human cross-reactive antibodies. Particularly preferred are fragments comprising receptors or domains of enzymes that confer a function essential for viability of Klebsiellae or any other pathogenic Klebsiella species, or the ability to cause disease in humans. Further preferred fragments of the polypeptides according to the present invention are those that comprise or contain antigenic or immunogenic determinants in an animal, especially in a human. Such fragments are also referred to as antigenic fragment.

[0192] An antigenic fragment is preferably defined as a fragment, which is antigenic by itself or may be made antigenic when provided as a hapten. Therefore, also antigens or antigenic fragments showing one or, particularly for longer fragments, only a few amino acid exchanges are enabled by the present invention, provided that the antigenicity or antigenic capacities of such fragments with amino acid exchanges are not severely deteriorated on the exchange(s), i.e., suited for eliciting an appropriate immune response in an individual vaccinated with this antigen and identified by individual antibody preparations from individual sera.

[0193] Preferred examples of such fragments of the polypeptides according to the invention are those listed in Table 16 (SED ID NOs 188-203 and 376).

[0194] Further preferred examples of such fragments of the polypeptides according to the present invention are the core amino acid sequence as indicated in column “Predicted immunogenic aa” or “Location of identified immunogenic region” of Table 1, or as defined by columns “From aa” and “To aa” of Table 4, or as indicated in column “Location in protein (aa)” of Table 5.

[0195] All these fragments listed in tables 1, 4 and 5 individually and each independently form a preferred selected aspect of the present invention.

[0196] It will be appreciated that the invention also relates to, among others, nucleic acid molecules encoding the aforementioned fragments, variants, active variants, and active fragments, nucleic acid molecules that hybridise to nucleic acid molecules encoding the fragments, variants, active variants, and active fragments, particularly those that hybridise under stringent conditions, and nucleic acid molecules, such as PCR primers, for amplifying nucleic acid molecules that encode the fragments. In these regards, preferred nucleic acid molecules are those that correspond to the preferred fragments, as discussed above.

[0197] The polypeptides according to the present invention may be expressed in a modified form, such as a fusion protein, and may include not only secretion signals but also additional heterologous functional regions. Thus, for instance, a region of additional amino acids, particularly charged amino acids, may be added to the N- or C-terminus of the polypeptide to improve stability and persistence in the host cell, during purification or during subsequent handling and storage. Also, regions may be added to the polypeptide to facilitate purification or to enhance expression. Such regions may be removed prior to final preparation of the polypeptide. The addition of peptide moieties to polypeptides to engender secretion or excretion, to improve stability, to enhance expression or to facilitate purification, among others, are familiar and routine techniques in the art. A preferred fusion protein comprises a heterologous region from immunoglobulin that is useful to solubilize or purify polypeptides. For example, EP 0 464 533 discloses fusion proteins comprising various portions of constant region of immunoglobin molecules together with another protein or part thereof. In drug discovery, for example, proteins have been fused with antibody Fc portions for the purpose of high-throughout screening assays to identify antagonists. See for example, (Bennett, D. et al., 1995) and (Johanson, K. et al., 1995). Fusions also may include the polypeptides according to the present invention fused or coupled to moieties other than amino acids, including lipids and carbohydrates. Further, antigens of this invention may be employed in combination with other vaccinal agents described by the prior art, as well as with other species of vaccinal agents derived from other microorganisms. Such proteins are useful in the prevention, treatment and diagnosis of diseases caused by a wide spectrum of Klebsiella isolates.

[0198] In a further embodiment the peptide of the invention is fused to an epitope tag which provides an epitope to which an anti-tag substance can selectively bind. The epitope tag is generally placed at the amino- or carboxyl-terminus of the peptide but may be incorporated as an internal insertion or substitution as the biological activity permits. The presence of such epitope-tagged forms of a peptide can be detected using a substance such as an antibody against the tagged peptide. Also, provision of the epitope tag enables the peptide to be readily purified by affinity purification using an anti-tag antibody or another type of affinity matrix that binds to the epitope tag. Various tag polypeptides and their respective antibodies are well known in the art. Examples include poly-histidine (poly-his), poly-histidine-glycine (poly-his-gly) tags, the HA tag polypeptide, the c-myc tag, the Strep tag and the FLAG tag.

[0199] The polypeptides of the invention may be prepared by any of a number of conventional techniques. For example, they can be produced by chemical synthesis as well as by biotechnological means. The latter comprise the transfection or transformation of a host cell with a vector containing a nucleic acid according to the present invention. In a preferred embodiment the vector is a vector according to the present invention. The biotechnological production of the polypeptides according to the present invention further comprises the cultivation of the transfected or transformed host cell under conditions, that allow expression of the protein and which are known to the one skilled in the art. The expressed protein is recovered, isolated, and optionally purified from the cell (or from the culture medium, if expressed extracellularly) by appropriate means known to one of skill in the art. For example, the proteins are isolated in soluble form following cell lysis, or extracted using known techniques, e.g. in guanidine chloride. The molecules comprising the polypeptides and antigens of this invention may be further purified using any of a variety of conventional methods including, but not limited to: ammonium sulfate or ethanol precipitation, acid extraction, liquid chromatography such as normal or reversed phase, using HPLC, FPLC and the like; affinity chromatography (such as with inorganic ligands or monoclonal antibodies), size exclusion chromatography, anion or cation exchange chromatography, phosphocellulose chromatography, hydrophobic interaction chromatography, hydroxylapatite chromatography, lectin chromatography, immobilized metal chelate chromatography, gel electrophoresis, and the like. One of skill in the art may select the most appropriate isolation and purification techniques without departing from the scope of this invention. Such purification provides the antigen in a form substantially free from other proteinaceous and non-proteinaceous materials of the microorganism.

[0200] An alternative approach to prepare polypeptides according to the invention involves generating the fragments of known peptides by enzymatic digestion, e.g., by treating the protein with an enzyme known to cleave proteins at sites defined by particular amino acid residues, or by digesting the DNA with suitable restriction enzymes, expressing the digested DNA and isolating the desired fragment. Yet another suitable technique involves isolating and amplifying a DNA fragment encoding a desired peptide fragment, by polymerase chain reaction (PCR). Oligonucleotides that define the desired termini of the DNA fragment are employed as the 5′ and 3′ primers in the PCR. Techniques for making mutations, such as deletions, insertions and substitutions, at predetermined sites in DNA, and therefore in proteins, having a known sequence are well known. One of skill in the art using conventional techniques, such as PCR, may readily use the antigens and peptides provided herein to identify and isolate other similar proteins. Such methods are routine and not considered to require undue experimentation, given the information provided herein. For example, variations can be made using oligonucleotide-mediated site-directed mutagenesis (Carter, P. et al., 1986; Zoller, M. J. et al., 1987), cassette mutagenesis (Wells, J. A. et al., 1985), restriction selection mutagenesis (Wells et al., 1986), PCR mutagenesis, or other known techniques can be performed on the cloned DNA to produce the peptide of the invention.

[0201] The polypeptide according to the present invention may be used for the detection of the organism or organisms in a sample containing these organisms or proteins or antigens, including fragments thereof. Preferably such detection is for diagnosis, more preferable for the diagnosis of a disease, most preferably for the diagnosis of a disease related or linked to the presence or abundance of Gram-negative bacteria, especially bacteria selected from the group comprising pathogenic Klebsiella species, especially K. pneumoniae including the three subspecies pneumoniae, ozaenae and rhinoscleromatis, K. oxytoca, K. planticola, K. terrigena, and K. ornithinolytica, and more preferably from K. pneumoniae or K. oxytoca.

[0202] The nucleic acids according to the present invention can also be used for the diagnosis or detection of organisms or organisms in a sample, whereby the organisms are preferably the same ones as disclosed in connection with the use of the polypeptides according to the present invention and the antibody according to the present invention, respectively. Basically, it is within the skills of the person of the art to design and practice such diagnosis and detection assays and methods, respectively, in the light of the present disclosure. More preferably such diagnosis or detection uses primers or probes to specifically interact with the nucleic acid molecules according to the present invention. The length and design of such primers and probes, respectively, varies depending on the particular method or diagnosis practiced. Using, in a preferred embodiment, a primer for, e.g., a PCR based detection or diagnosis system, i.e. method or assay, the length of the primer will range from about 10 nucleotides to about 30 nucleotides and more preferably from about 16 to 25 nucleotides. In case of a probe based detection or diagnosis system the length of the probe is preferably about the same as specified for the primer based system. Additionally, in case of a probe based system, the probe will comprise a moiety which allows its detection, either directly or indirectly. Such moiety for direct detection can be a radioactive label or a fluorescence label as known to the ones skilled in the art. Such moiety for indirect detection can be a biotin or any other moiety which mediates interaction with a further compound which in turn is labelled so as to allow its detection.

[0203] The present invention also relates to diagnostic assays such as quantitative and diagnostic assays for detecting levels of the polypeptides according to the present invention and more preferably antigens and fragments thereof of the present invention in cells and tissues, including determination of normal and abnormal levels. Thus, for instance, a diagnostic assay in accordance with the invention for detecting over-expression of the polypeptides according to the present invention compared to normal control tissue samples may be used to detect the presence of an infection, for example, and to identify the infecting organism. Assay techniques that can be used to determine levels of such polypeptides in a sample derived from a host are well known to those of skill in the art. Such assay methods include radioimmunoassays, competitive-binding assays, Western Blot analysis and ELISA assays. Among these, ELISA and Western Blot analysis frequently are preferred. An ELISA assay initially comprises preparing an antibody specific to one of the polypeptides according to the present invention, preferably a monoclonal antibody. In addition, a reporter antibody generally is prepared which binds to the monoclonal antibody. The reporter antibody is attached to a detectable reagent such as radioactive, fluorescent or enzymatic reagent, such as horseradish peroxidase enzyme. One or several of the polypeptides according to the present invention and more preferably an antigen and fragment thereof according to the present invention may be immobilised on ELISA plates for detection of reactive antibodies in sera of patients or subjects to be tested.

[0204] A Western blot assay initially separates the polypeptides according to the present invention individually or in combination by SDS-polyacrylamide gelelectrophoresis and which subsequently are transferred and immobilised onto a solid support matrix, such as nitrocellulose, nylon or combinations thereof. Together with a reporter antibody reactive antibodies can be detected. The reporter antibody is attached to a detectable reagent such as radioactive, fluorescent or enzymatic reagent, such as horseradish peroxidase enzyme.

[0205] The polypeptides according to the present invention or the nucleic acid molecules according to the present invention or primers or probes directed thereto as described herein, may also be used for the purpose of or in connection with an array. In case of the nucleic acid molecule according to the present invention and the primers and probes directed thereagainst, the length of the probes and the primer, can also preferably be in the range from about 25 to about 75 nucleotides, more preferably from about 35 to about 50 nucleotides. More particularly, at least one of the polypeptides according to the present invention may be immobilized on a support. Said support typically comprises a variety of the polypeptides according to the present invention and/or antigens and fragments thereof whereby the variety may be created by using one or several of the antigens and fragments thereof according to the present invention and/or antigens and fragments thereof being different. The characterizing feature of such array as well as of any array in general is the fact that at a distinct or predefined region or position on said support or a surface thereof, a distinct polypeptide is immobilized. Because of this any activity at a distinct position or region of an array can be correlated with a specific polypeptide. The number of different polypeptides and more preferably different antigens and fragments thereof immobilized on a support may range from as little as 10 to several 1,000 different polypeptides and antigens and fragments thereof, respectively. The density of said molecules per cm² is in a preferred embodiment as little as 10 per cm² to at least 400 different of such polypeptides per cm² and more particularly at least 1,000 different of such polypeptides and more preferably different antigens and fragments thereof per cm². What is said herein about the immobilization of the polypeptides according to the present invention and their use, is also applicable to the nucleic acid molecules and the primers and probes, respectively, directed thereagainst, as will be acknowledged by the ones skilled in the art.

[0206] The manufacture of such arrays is known to the one skilled in the art and, for example, described in U.S. Pat. No. 5,744,309. The array preferably comprises a planar, porous or non-porous solid support having at least a first surface. The polypeptides according to the present invention are immobilized on said surface. Preferred support materials are, among others, glass or cellulose. It is also within the present invention that the array is used for any of the diagnostic applications described herein. Apart from the polypeptides according to the present invention also the nucleic acid molecules according to the present invention may be used for the generation of an array as described above which, in principle, can be used for any of the purposes disclosed for the array containing polypeptides. This applies as well to an array made of antibodies, preferably monoclonal antibodies as, among others, described herein.

[0207] In a further aspect the present invention relates to an antibody directed to any of polypeptides according to the present invention, derivatives, fragments, variants, active fragments and active variants thereof according to the present invention. The present invention includes, for example, monoclonal and polyclonal antibodies, chimeric, single chain, and humanized antibodies, as well as Fab fragments, or the product of a Fab expression library. It is within the present invention that the antibody may be chimeric, i.e. that different parts thereof stem from different species or at least the respective sequences are taken from different species.

[0208] Such antibodies in general and in particular directed against the antigens and fragments thereof corresponding to a sequence of the present invention can be obtained by direct injection of a polypeptide according to the present invention into an animal or by administering said polypeptide to an animal, preferably a non-human. The antibody so obtained will then bind said polypeptide itself. In this manner, even a sequence encoding only a fragment said polypeptide can be used to generate antibodies binding the whole native polypeptides according to the present invention. Such antibodies can then be used to isolate the polypeptide according to the present invention from tissue expressing antigens and fragments thereof. It will be understood by the ones skilled in the art that this procedure is also applicable to the fragments, variants, active fragments and active variants thereof of said polypeptides.

[0209] For preparation of monoclonal antibodies, any technique known in the art, which provides antibodies produced by continuous cell line cultures can be used (as described originally in (Kohler, G. et al., 1975)).

[0210] Techniques described for the production of single chain antibodies (U.S. Pat. No. 4,946,778) can be adapted to produce single chain antibodies to immunogenic antigens and fragments thereof in their diverse embodiments according to this invention. Also, transgenic mice, or other organisms such as other mammals, may be used to express humanized antibodies to the polypeptides according to the present invention.

[0211] Still another aspect of the invention relates to a hybridoma cell line which produces the antibody of the invention.

[0212] Hybridoma cell lines expressing desirable monoclonal antibodies are generated by well-known conventional techniques. The hybridoma cell can be generated by fusing a normal-activated, antibody-producing B cell with a myeloma cell. In the context of the present invention the hybridoma cell is able to produce an antibody specifically binding to the antigen of the invention.

[0213] Similarly, desirable high titer antibodies are generated by applying known recombinant techniques to the monoclonal or polyclonal antibodies developed to these antigens (see, e.g., PCT Patent Application No. PCT/GB85/00392; British Patent Application Publication No. GB2188638A; Amit, A. G. et al., 1986; Queen, C. et al., 1989; PCT Patent Application No. WO90/07861; Riechmann, L. et al., 1988; Huse, W. D. et al., 1988).

[0214] Alternatively, phage display technology or ribosomal display could be utilized to select antibody genes with binding activities towards the polypeptides according to the present invention either from repertoires of PCR amplified v-genes of lymphocytes from humans screened for possessing respective target antigens or from naïve libraries (McCafferty, J. et al., 1990); (Marks, J. et al., 1992). The affinity of these antibodies can also be improved by chain shuffling (Clackson, T. et al., 1991).

[0215] If two antigen binding domains are present, each domain may be directed against a different epitope—termed ‘bispecific’ antibodies.

[0216] The above-described antibodies may be employed to isolate or to identify clones expressing the polypeptides according to the present invention by attachment of the antibody to a solid support for isolation and/or purification by affinity chromatography.

[0217] Thus, among others, antibodies against the polypeptides according to the present invention may be employed to inhibit and/or treat infections, particularly bacterial infections and especially infections arising from pathogenic Klebsiella species, especially K. pneumoniae including the three subspecies pneumoniae, ozaenae and rhinoscleromatis, K. oxytoca, K. planticola, K. terrigena, and K. ornithinolytica, and more preferably from K. pneumoniae or K. oxytoca.

[0218] The polypeptides according to the present invention and more specifically antigens and fragments thereof in their diverse embodiments include antigenically, epitopically or immunologically equivalent derivatives, which form a particular aspect of this invention. The term “antigenically equivalent derivative” as used herein encompasses such polypeptide according to the present invention or its equivalent which will be specifically recognized by certain antibodies which, when raised to said polypeptide, interfere with the interaction between pathogen and mammalian host. The term “immunologically equivalent derivative” as used herein encompasses a peptide or its equivalent which when used in a suitable formulation to raise antibodies in a vertebrate, the antibodies act to interfere with the interaction between pathogen and mammalian host.

[0219] The polypeptides according to the present invention and more specifically the antigens and fragments thereof in their diverse embodiments, such as an antigenically or immunologically equivalent derivative or a fusion protein thereof can be used as an antigen to immunize a mouse or other animal such as a rat or chicken. The fusion protein may provide stability to the polypeptide according to the present invention. Such polypeptide may be associated, for example by conjugation, with an immunogenic carrier protein, for example bovine serum albumin (BSA) or keyhole limpet haemocyanin (KLH). Alternatively, an antigenic peptide comprising multiple copies of the polypeptide according to the present invention and more preferably an antigen and fragments thereof, or an antigenically or immunologically equivalent antigen and fragments thereof, may be sufficiently antigenic to improve immunogenicity so as to obviate the use of a carrier.

[0220] Preferably the antibody or derivative thereof is modified to make it less immunogenic in the individual. For example, if the individual is human the antibody may most preferably be “humanized”, wherein the complementarity determining region(s) of the hybridoma-derived antibody has been transplanted into a human monoclonal antibody, for example as described in (Jones, P. et al., 1986) or (Tempest, P. et al., 1991).

[0221] The use of a nucleic acid molecule according to the present invention in genetic immunization will preferably employ a suitable delivery method such as direct injection of plasmid DNA into muscle, delivery of DNA complexed with specific protein carriers, coprecipitation of DNA with calcium phosphate, encapsulation of DNA in various forms of liposomes, particle bombardment (Tang, D. et al., 1992), (Eisenbraun, M. et al., 1993) and in vivo infection using cloned retroviral vectors (Seeger, C. et al., 1984).

[0222] In a further aspect the present invention relates to a peptide binding to any of the polypeptides according to the present invention, and a method for the preparation of such peptides whereby the method is characterized by the use of said polypeptide and the basic steps are known to the one skilled in the art.

[0223] Such peptides may be generated by using methods according to the state of the art such as phage display or ribosome display. In case of phage display, basically a library of peptides is generated, in form of phages, and this kind of library is contacted with the target molecule, in the present case a polypeptide according to the present invention. Those peptides binding to the target molecule are subsequently removed, preferably as a complex with the target molecule, from the respective reaction. It is known to the one skilled in the art that the binding characteristics, at least to a certain extent, depend on the particularly realized experimental set-up such as the salt concentration and the like. After separating those peptides binding to the target molecule with a higher affinity or a bigger force, from the non-binding members of the library, and optionally also after removal of the target molecule from the complex of target molecule and peptide, the respective peptide(s) may subsequently be characterised. Prior to the characterisation optionally an amplification step is realized such as, e.g. by propagating the peptide encoding phages. The characterisation preferably comprises the sequencing of the target binding peptides. Basically, the peptides are not limited in their lengths, however preferably peptides having a length from about 8 to 20 amino acids are preferably obtained in the respective methods. The size of the libraries may be about 10² to 10¹⁸, preferably 10⁸ to 10¹⁵ different peptides, however, is not limited thereto. In a preferred embodiment such peptides are high-affinity binding peptides. In an even more preferred embodiment the peptides are peptide aptamers.

[0224] A particular form of target binding peptides as described above, are the so-called “anticalines” which are, among others, described in German patent application DE 19742706. In so far, the present invention is also related to peptides specifically binding to the polypeptides according to the present invention and the use thereof for any of the therapeutic and diagnostic applications described herein, preferably for antibodies.

[0225] In a further aspect the present invention relates to functional nucleic acids interacting with any of the polypeptides according to the present invention, and a method for the preparation of such functional nucleic acids whereby the method is characterized by the use of the polypeptides according to the present invention and the basic steps are known to the one skilled in the art. The functional nucleic acids are preferably aptamers and spiegelmers. In so far, the present invention is also related to aptamers and spiegelmers specifically binding to the polypeptides according to the present invention and the use thereof for any of the therapeutic and diagnostic applications described herein, preferably for antibodies.

[0226] Aptamers are D-nucleic acids, which are either single stranded or double stranded and which specifically interact with a target molecule. The preparation or selection of aptamers is, e.g. described in European patent EP 0 533 838. Basically the following steps are realized. First, a mixture of nucleic acids, i.e. potential aptamers, is provided whereby each nucleic acid typically comprises a segment of several, preferably at least eight subsequent randomised nucleotides. This mixture is subsequently contacted with the target molecule whereby the nucleic acid(s) bind to the target molecule, such as based on an increased affinity towards the target or with a bigger force thereto, compared to the candidate mixture. The binding nucleic acid(s) are/is subsequently separated from the remainder of the mixture. Optionally, the thus obtained nucleic acid(s) is amplified using, e.g. polymerase chain reaction. These steps may be repeated several times giving at the end a mixture having an increased ratio of nucleic acids specifically binding to the target from which the final binding nucleic acid is then optionally selected. These specifically binding nucleic acid(s) are referred to as aptamers. It is obvious that at any stage of the method for the generation or identification of the aptamers samples of the mixture of individual nucleic acids may be taken to determine the sequence thereof using standard techniques. It is within the present invention that the aptamers may be stabilized such as, e.g., by introducing defined chemical groups which are known to the one skilled in the art of generating aptamers. Such modification may for example reside in the introduction of an amino group at the 2′-position of the sugar moiety of the nucleotides. Aptamers are currently used as therapeutic agents. However, it is also within the present invention that the thus selected or generated aptamers may be used for target validation and/or as lead substance for the development of pharmaceutical compositions, preferably of pharmaceutical compositions based on small molecules. This is actually done by a competition assay whereby the specific interaction between the target molecule and the aptamer is inhibited by a candidate drug whereby upon replacement of the aptamer from the complex of target and aptamer it may be assumed that the respective drug candidate allows a specific inhibition of the interaction between target and aptamer, and if the interaction is specific, said candidate drug will, at least in principle, be suitable to block the target and thus decrease its biological availability or activity in a respective system comprising such target. The thus obtained small molecule may then be subject to further derivatisation and modification to optimise its physical, chemical, biological and/or medical characteristics such as toxicity, specificity, biodegradability and bioavailability.

[0227] Spiegelmers and their generation or preparation is based on a similar principle. The preparation of spiegelmers is described in international patent application WO 98/08856. Spiegelmers are L-nucleic acids, which means that they are composed of L-nucleotides rather than D-nucleotides as aptamers are. Spiegelmers are characterized by the fact that they have a very high stability in biological systems and, comparable to aptamers, specifically interact with the target molecule against which they are directed. In the process of generating spiegelmers, a heterogeneous population of D-nucleic acids is created and this population is contacted with the optical antipode of the target molecule, in the present case for example with the D-enantiomer of the naturally occurring L-enantiomer of the antigens and fragments thereof according to the present invention. Subsequently, those D-nucleic acids are separated which do not interact with the optical antipode of the target molecule. But those D-nucleic acids interacting with the optical antipode of the target molecule are separated, optionally identified and/or sequenced and subsequently the corresponding L-nucleic acids are synthesized based on the nucleic acid sequence information obtained from the D-nucleic acids. These L-nucleic acids, which are identical in terms of sequence with the aforementioned D-nucleic acids interacting with the optical antipode of the target molecule, will specifically interact with the naturally occurring target molecule rather than with the optical antipode thereof. Similar to the method for the generation of aptamers it is also possible to repeat the various steps several times and thus to enrich those nucleic acids specifically interacting with the optical antipode of the target molecule.

[0228] In a further aspect the present invention relates to functional nucleic acids interacting with any of the nucleic acid molecules according to the present invention, and a method for the preparation of such functional nucleic acids whereby the method is characterized by the use of the nucleic acid molecules and their respective sequences according to the present invention and the basic steps are known to the one skilled in the art. The functional nucleic acids are preferably ribozymes, antisense oligonucleotides and siRNA. In so far, the present invention is also related to this kind of functional nucleic acid specifically binding to the polypeptides according to the present invention and the use thereof for any of the therapeutic and diagnostic applications described herein, preferably for antibodies.

[0229] Ribozymes are catalytically active nucleic acids, which preferably consist of RNA, which basically comprises two moieties. The first moiety shows a catalytic activity whereas the second moiety is responsible for the specific interaction with the target nucleic acid, in the present case the nucleic acid coding for the polypeptides according to the present invention. Upon interaction between the target nucleic acid and the second moiety of the ribozyme, typically by hybridisation and Watson-Crick base pairing of essentially complementary stretches of bases on the two hybridising strands, the catalytically active moiety may become active which means that it catalyses, either intramolecularly or intermolecularly, the target nucleic acid in case the catalytic activity of the ribozyme is a phosphodiesterase activity. Subsequently, there may be a further degradation of the target nucleic acid, which in the end results in the degradation of the target nucleic acid as well as the protein derived from the said target nucleic acid. Ribozymes, their use and design principles are known to the one skilled in the art, and, for example described in (Doherty, E. et al., 2001) and (Lewin, A. et al., 2001).

[0230] The activity and design of antisense oligonucleotides for the preparation of a pharmaceutical composition and as a diagnostic agent, respectively, is based on a similar mode of action. Basically, antisense oligonucleotides hybridise based on base complementarity, with a target RNA, preferably with a mRNA, thereby activating RNase H. RNase H is activated by both phosphodiester and phosphorothioate-coupled DNA. Phosphodiester-coupled DNA, however, is rapidly degraded by cellular nucleases with the exception of phosphorothioate-coupled DNA. These resistant, non-naturally occurring DNA derivatives do not inhibit RNase H upon hybridisation with RNA. In other words, antisense polynucleotides are only effective as DNA RNA hybrid complexes. Examples for this kind of antisense oligonucleotides are described, among others, in U.S. Pat. No. 5,849,902 and U.S. Pat. No. 5,989,912. In other words, based on the nucleic acid sequence of the target molecule which in the present case are the nucleic acid molecules for the antigens and fragments thereof according to the present invention, either from the target protein from which a respective nucleic acid sequence may in principle be deduced, or by knowing the nucleic acid sequence as such, particularly the mRNA, suitable antisense oligonucleotides may be designed base on the principle of base complementarity.

[0231] Particularly preferred are antisense-oligonucleotides, which have a short stretch of phosphorothioate DNA (3 to 9 bases). A minimum of 3 DNA bases is required for activation of bacterial RNase H and a minimum of 5 bases is required for mammalian RNase H activation. In these chimeric oligonucleotides there is a central region that forms a substrate for RNase H that is flanked by hybridising “arms” comprised of modified nucleotides that do not form substrates for RNase H. The hybridising arms of the chimeric oligonucleotides may be modified such as by 2″-O-methyl or 2′-fluoro. Alternative approaches used methylphosphonate or phosphoramidate linkages in said arms. Further embodiments of the antisense oligonucleotide useful in the practice of the present invention are P-methoxyoligonucleotides, partial P-methoxyoligodeoxy-ribonucleotides or P-methoxyo ligodeoxy-ribonucleotides.

[0232] Of particular relevance and usefulness for the present invention are those antisense oligonucleotides as more particularly described in the above two mentioned US patents. These oligonucleotides contain no naturally occurring 5″=>3′-linked nucleotides. Rather the oligonucleotides have two types of nucleotides: 2′-deoxyphosphorothioate, which activate RNase H, and 2′-modified nucleotides, which do not. The linkages between the 2′-modified nucleotides can be phosphodiesters, phosphorothioate or P-ethoxyphosphodiester. Activation of RNase H is accomplished by a contiguous RNase H-activating region, which contains between 3 and 5 2′-deoxyphosphorothioate nucleotides to activate bacterial RNase H and between 5 and 10 2′-deoxyphosphorothioate nucleotides to activate eukaryotic and, particularly, mammalian RNase H.

[0233] Protection from degradation is accomplished by making the 5′ and 3′ terminal bases highly nuclease resistant and, optionally, by placing a 3′ terminal blocking group.

[0234] More particularly, the antisense oligonucleotide comprises a 5′ terminus and a 3′ terminus; and from position 11 to 59 5′=>3′-linked nucleotides independently selected from the group consisting of 2′-modified phosphodiester nucleotides and 2′-modified P-alkyloxyphosphotriester nucleotides; and wherein the 5′-terminal nucleoside is attached to an RNase H-activating region of between three and ten contiguous phosphorothioate-linked deoxyribonucleotides, and wherein the 3″-terminus of said oligonucleotide is selected from the group consisting of an inverted deoxyribonucleotide, a contiguous stretch of one to three phosphorothioate 2′-modified ribonucleotides, a biotin group and a P-alkyloxyphosphotriester nucleotide.

[0235] Also an antisense oligonucleotide may be used wherein not the 5′ terminal nucleoside is attached to an RNase H-activating region but the 3′ terminal nucleoside as specified above. Also, the 5′ terminus is selected from the particular group rather than the 3′ terminus of said oligonucleotide.

[0236] The nucleic acids as well as the polypeptides according to the present invention in their diverse embodiments may be used as or for the preparation of pharmaceutical compositions, especially vaccines. Preferably such pharmaceutical composition, preferably vaccine is, for the prevention or treatment of diseases caused by, related to or associated with Klebsiella species, preferably pathogenic Klebsiella, especially K. pneumoniae including the three subspecies pneumoniae, ozaenae and rhinoscleromatis, K. oxytoca, K. planticola, K. terrigena, and K. ornithinolytica, and more preferably from K. pneumoniae or K. oxytoca. In so far another aspect of the invention relates to a method for inducing an immunological response in an individual, particularly a mammal, which comprises inoculating the individual with the polypeptides according to the present invention in their diverse embodiments, or a fragment or variant thereof, adequate to produce antibodies to protect said individual from infection by the above microorganisms.

[0237] Yet another aspect of the invention relates to a method of inducing an immunological response in an individual which comprises, through gene therapy or otherwise, delivering a nucleic acid molecule according to the present invention, preferably functionally encoding antigens and fragments thereof in their diverse embodiments, for expressing the polypeptide according to the present invention in vivo in order to induce an immunological response to produce antibodies or a cell mediated T cell response, either cytokine-producing T cells or cytotoxic T cells, to protect said individual from disease, whether that disease is already established within the individual or not. One-way of administering the gene is by accelerating it into the desired cells as a coating on particles or otherwise.

[0238] A further aspect of the invention relates to an immunological composition which, when introduced into a host capable of having induced within it an immunological response, induces an immunological response in such host, wherein the composition comprises recombinant DNA which codes for and expresses at least one of the polypeptides according to the present invention in their diverse embodiments. The immunological response may be used therapeutically or prophylactically and may take the form of antibody immunity or cellular immunity such as that arising from CTL or CD4+ T cells.

[0239] The polypeptides according to the present invention in their diverse embodiments may be fused with a co-protein which may not by itself produce antibodies, but is capable of stabilizing the first protein and producing a fused protein which will have immunogenic and protective properties. This fused recombinant protein preferably further comprises an antigenic co-protein, such as Glutathione-S-transferase (GST) or beta-galactosidase, relatively large co-proteins which solubilise the protein and facilitate production and purification thereof. Moreover, the co-protein may act as an adjuvant in the sense of providing a generalized stimulation of the immune system. The co-protein may be attached to either the amino or carboxy terminus of the first protein.

[0240] Also provided by this invention are methods using the nucleic acid molecule according to the present invention in their diverse embodiments in such genetic immunization experiments in animal models of infection with any of the Klebsiella species described herein, especially K. pneumoniae including the three subspecies pneumoniae, ozaenae and rhinoscleromatis, K. oxytoca, K. planticola, K. terrigena, and K. ornithinolytica, and more preferably from K. pneumoniae or K. oxytoca. Such molecules will be particularly useful for identifying protein epitopes able to provoke a prophylactic or therapeutic immune response. This approach can allow for the subsequent preparation of monoclonal antibodies of particular value from the requisite organ of the animal successfully resisting or clearing infection for the development of prophylactic agents or therapeutic treatments of the Klebsiella species described herein and especially K. pneumoniae including the three subspecies pneumoniae, ozaenae and rhinoscleromatis, K. oxytoca, K. planticola, K. terrigena, and K. ornithinolytica, and more preferably from K. pneumoniae or K. oxytoca, infection in mammals, particularly humans.

[0241] The polypeptides according to the present invention in their diverse embodiments may be used as an antigen for vaccination of a host to produce specific antibodies which protect against invasion of bacteria, for example by blocking adherence of bacteria to damaged tissue. Examples of tissue damage and thus damaged tissue include wounds in skin or connective tissue and mucosal tissues caused e.g. by viral infection (esp. respiratory, such as the flu) mechanical, chemical or thermal damage or by implantation of indwelling devices, or wounds in the mucous membranes, such as the mouth, mammary glands, urethra or vagina.

[0242] The present invention also includes a vaccine formulation, which comprises one or several of polypeptides according to the present invention in their diverse embodiments together with one or more suitable carriers and/or excipients. The pharmaceutically acceptable carriers and/or excipients useful in this invention are conventional and may include buffers, stabilizers, diluents, preservatives, and solubilizers. Remington's Pharmaceutical Sciences, by E. W. Martin, Mack Publishing Co., Easton, Pa., 15th Edition (1975), describes compositions and formulations suitable for pharmaceutical delivery of the (poly)peptides herein disclosed. In general, the nature of the carrier or excipients will depend on the particular mode of administration being employed. For instance, parenteral formulations usually comprise injectable fluids that include pharmaceutically and physiologically acceptable fluids such as water, physiological saline, balanced salt solutions, aqueous dextrose, glycerol or the like as a vehicle. For solid compositions (e.g. powder, pill, tablet, or capsule forms), conventional non-toxic solid carriers can include, for example, pharmaceutical grades of mannitol, lactose, starch, or magnesium stearate. In addition to biologically neutral carriers, pharmaceutical compositions to be administered can contain minor amounts of non-toxic auxiliary substances, such as wetting or emulsifying agents, preservatives, and pH buffering agents and the like, for example sodium acetate or sorbitan monolaurate.

[0243] Since said polypeptides according to the present invention may be broken down in the stomach, they are preferably administered parenterally, including, for example, administration that is subcutaneous, intramuscular, intravenous, intradermal, intranasal or transdermal. Formulations suitable for parenteral administration include aqueous and non-aqueous sterile injection solutions which may contain anti-oxidants, buffers, bacteriostats and solutes which render the formulation isotonic with the body fluid, preferably the blood, of the individual; and aqueous and non-aqueous sterile suspensions which may include suspending agents or thickening agents. The formulations may be presented in unit-dose or multi-dose containers, for example, sealed ampoules and vials, and may be stored in a freeze-dried condition requiring only the addition of the sterile liquid carrier immediately prior to use. The vaccine formulation may also include adjuvant systems for enhancing the immunogenicity of the formulation, such as oil-in-water systems and other systems known in the art. The dosage will depend on the specific activity of the vaccine and can be readily determined by routine experimentation.

[0244] According to another aspect, the present invention relates to a pharmaceutical composition comprising one or several of the polypeptides according to the present invention in their diverse embodiments for the various Klebsiella species described herein and especially K. pneumoniae including the three subspecies pneumoniae, ozaenae and rhinoscleromatis, K. oxytoca, K. planticola, K. terrigena, and K. ornithinolytica, and more preferably from K. pneumoniae or K. oxytoca. Such a pharmaceutical composition may comprise one, preferably at least two or more of said polypeptides against said Klebsiella species. Optionally, such polypeptides may also be combined with antigens against even further pathogens in a combination pharmaceutical composition. Preferably, said pharmaceutical composition is a vaccine for preventing or treating an infection caused by a Klebsiella species, more preferably a pathogenic Klebsiella species such as K. pneumoniae including the three subspecies pneumoniae, ozaenae and rhinoscleromatis, K. oxytoca, K. planticola, K. terrigena, and K. ornithinolytica, and more preferably from K. pneumoniae or K. oxytoca and/or other pathogens against which the antigens have been included in the vaccine.

[0245] According to a further aspect, the present invention relates to a pharmaceutical composition comprising a nucleic acid molecule according to the present invention. Such a pharmaceutical composition may comprise one or more nucleic acid molecules according to the present invention encoding a polypeptide according to the present invention. Optionally, such nucleic acid molecules encoding the polypeptides according to the present invention are combined with nucleic acid molecules encoding antigens against other pathogens in a combination pharmaceutical composition. Preferably, said pharmaceutical composition is a vaccine for preventing or treating an infection caused by Klebsiella species, more preferably pathogenic Klebsiella species as disclosed herein, especially K. pneumoniae including the three subspecies pneumoniae, ozaenae and rhinoscleromatis, K. oxytoca, K. planticola, K. terrigena, and K. ornithinolytica, and more preferably from K. pneumoniae or K. oxytoca, and/or other pathogens against which the antigens have been included in the vaccine.

[0246] The pharmaceutical composition may contain any suitable auxiliary substances, such as buffer substances, stabilisers or further active ingredients, especially ingredients known in connection of pharmaceutical composition and/or vaccine production.

[0247] In a preferred embodiment the pharmaceutical composition further comprises an immunostimulatory substance such as an adjuvant. The adjuvant can be selected based on the method of administration and may include polycationic substances, especially polycationic peptides, immunostimulatory nucleic acids molecules, preferably immunostimulatory oligo-deoxynucleotides (ODNs), especially Oligo(dIdC)₁₃, peptides containing at least two LysLeuLys motifs, especially peptide KLKLLLLLKLK, alum, mineral oil-based adjuvants such as Freund's complete adjuvant and Freund's incomplete adjuvant, neuroactive compounds, especially human growth hormone, or any combination of one or more of the above mentioned adjuvants. Other suitable adjuvants may be selected from the group consisting of Montanide incomplete Seppic adjuvant such as ISA, oil in water emulsion adjuvants such as the Ribi adjuvant system, syntax adjuvant formulation containing muramyl dipeptide, or aluminum salt adjuvants or combinations thereof. Preferably, the adjuvant is IC31® (Intercell; a synthetic adjuvant comprising the peptide motif KLK as described in WO 02/32451 and an oligonucleotide as described in WO 01/93905).

[0248] The term “Oligo(dIdC)₁₃” as used in the present invention means a phosphodiester substituted single-stranded ODN containing 13 deoxy (inosine-cytosine) motifs, also defined by the term [oligo-d(IC)₁₃]. The exact sequence is 5′-dIdCdIdCdIdCdIdCdIdCdIdCdIdCdIdCdIdCdIdCdIdCdIdCdIdC-3′. Oligo(dIdC)₁₃ can also be defined by the terms (oligo-dIC₂₆); oligo-dIC₂₆₋ₘₑᵣ; oligo-deoxy IC, 26-mer; or oligo-dIC, 26-mer, as specified for example in WO 01/93903 and WO 01/93905.

[0249] It is also within the scope of the present invention that the pharmaceutical composition, especially vaccine, comprises apart from one or several of he polypeptides according to the present invention in their diverse embodiments and/or nucleic acid molecules coding thereof which are also in accordance with the present invention, other compounds which are biologically or pharmaceutically active. Preferably, the vaccine composition comprises at least one polycationic peptide. The polycationic compound(s) to be used according to the present invention may be any polycationic compound, which shows the characteristic effects according to the WO 97/30721. Preferred polycationic compounds are selected from basic polypeptides, organic polycations, basic polyamino acids or mixtures thereof. These polyamino acids should have a chain length of at least 4 amino acid residues (WO 97/30721). Especially preferred are substances like polylysine, polyarginine and polypeptides containing more than 20%, especially more than 50% of basic amino acids in a range of more than 8, especially more than 20, amino acid residues or mixtures thereof. Other preferred polycations and their pharmaceutical compositions are described in WO 97/30721 (e.g. polyethyleneimine) and WO 99/38528. Preferably these polypeptides contain between 20 and 500 amino acid residues, especially between 30 and 200 residues.

[0250] These polycationic compounds may be produced chemically or recombinantly or may be derived from natural sources.

[0251] Cationic (poly)peptides may also be anti-microbial with properties as reviewed in (Ganz, T., 1999). These (poly)peptides may be of prokaryotic or animal or plant origin or may be produced chemically or recombinantly (WO 02/13857). Peptides may also belong to the class of defensins (WO 02/13857). Sequences of such peptides can be, for example, found in the Antimicrobial Sequences Database under the following internet address: http://www.bbcm.univ.trieste.it/˜tossi/pag2.html

[0252] Such host defence peptides or defensives are also a preferred form of the polycationic polymer according to the present invention. Generally, a compound allowing as an end product activation (or down-regulation) of the adaptive immune system, preferably mediated by APCs (including dendritic cells) is used as polycationic polymer.

[0253] Especially preferred for use as polycationic substances in the present invention are cathelicidin derived antimicrobial peptides or derivatives thereof (International patent application WO 02/13857, incorporated herein by reference), especially antimicrobial peptides derived from mammalian cathelicidin, preferably from human, bovine or mouse.

[0254] Polycationic compounds derived from natural sources include HIV-REV or HIV-TAT (derived cationic peptides, antennapedia peptides, chitosan or other derivatives of chitin) or other peptides derived from these peptides or proteins by biochemical or recombinant production. Other preferred polycationic compounds are cathelin or related or derived substances from cathelin. For example, mouse cathelin is a peptide, which has the amino acid sequence NH₂—RLAGLLRKGGEKIGEKLKKIGOKIKNFFQKLVPQPE-COOH. Related or derived cathelin substances contain the whole or parts of the cathelin sequence with at least 15-20 amino acid residues. Derivations may include the substitution or modification of the natural amino acids by amino acids, which are not among the 20 standard amino acids. Moreover, further cationic residues may be introduced into such cathelin molecules. These cathelin molecules are preferred to be combined with the antigen. These cathelin molecules surprisingly have turned out to be also effective as an adjuvant for an antigen without the addition of further adjuvants. It is therefore possible to use such cathelin molecules as efficient adjuvants in vaccine formulations with or without further immunactivating substances.

[0255] Another preferred polycationic substance to be used in accordance with the present invention is a synthetic peptide containing at least 2 KLK-motifs separated by a linker of 3 to 7 hydrophobic amino acids (International patent application WO 02/32451, incorporated herein by reference).

[0256] The pharmaceutical composition of the present invention may further comprise immunostimulatory nucleic acid(s). Immunostimulatory nucleic acids are e.g. neutral or artificial CpG containing nucleic acids, short stretches of nucleic acids derived from non-vertebrates or in form of short oligonucleotides (ODNs) containing non-methylated cytosine-guanine di-nucleotides (CpG) in a certain base context (e.g. described in WO 96/02555). Alternatively, also nucleic acids based on inosine and cytidine as e.g. described in the WO 01/93903, or deoxynucleic acids containing deoxy-inosine and/or deoxyuridine residues (described in WO 01/93905 and WO 02/095027, incorporated herein by reference) may preferably be used as immunostimulatory nucleic acids in connection with the present invention. Preferably, the mixtures of different immunostimulatory nucleic acids may be used according to the present invention.

[0257] It is also within the present invention that any of the aforementioned polycationic compounds is combined with any of the immunostimulatory nucleic acids as aforementioned. Preferably, such combinations are according to the ones as described in WO 01/93905, WO 02/32451, WO 01/54720, WO 01/93903, WO 02/13857, WO 02/095027 and WO 03/047602, incorporated herein by reference.

[0258] In addition or alternatively such vaccine composition may comprise apart from the polypeptides according to the present invention, and the nucleic acid molecules according to the present invention, preferably the coding nucleic acid molecules according to the present invention, a neuroactive compound. Preferably, the neuroactive compound is human growth factor as, e.g. described in WO 01/24822. Also preferably, the neuroactive compound is combined with any of the polycationic compounds and/or immunostimulatory nucleic acids as afore-mentioned.

[0259] Also, the pharmaceutical composition in accordance with the present invention is a pharmaceutical composition which comprises at least any of the following compounds or combinations thereof: the nucleic acid molecules according to the present invention, the polypeptides according to the present invention in their diverse embodiments, the vector according to the present invention, the cells according to the present invention, the antibody according to the present invention, the functional nucleic acids according to the present invention and the binding peptides such as the anticalines and high-affinity binding peptides and peptide aptamers, respectively, according to the present invention, any agonists and antagonists according to the present invention, preferably screened as described herein. In connection therewith any of these compounds may be employed in combination with a non-sterile or sterile carrier or carriers for use with cells, tissues or organisms, such as a pharmaceutical carrier suitable for administration to a subject. Such compositions comprise, for instance, a media additive or a therapeutically effective amount of an antigen and fragments thereof of the invention and a pharmaceutically acceptable carrier or excipient. Such carriers may include, but are not limited to, saline, buffered saline, dextrose, water, glycerol, ethanol and combinations thereof. The formulation should suit the mode of administration.

[0260] The composition may be used e.g. for immunization or treatment of a subject. The pharmaceutical composition encompasses at least one peptide of the invention; however, it may also contain a cocktail (i.e., a simple mixture) containing different peptides (including fragments and other variants) of the invention, optionally mixed with different antigenic proteins or peptides of other pathogens. Such mixtures of these peptides, polypeptides, proteins or fragments or variants thereof are useful e.g. in the generation of desired antibodies to a wide spectrum of Klebsiella isolates. The peptide(s) of the present invention may also be used in the form of a pharmaceutically acceptable salt. Suitable acids and bases which are capable of forming salts with the peptides of the present invention are well known to those of skill in the art, and include inorganic and organic acids and bases.

[0261] Still another aspect of the present invention is a pharmaceutical composition containing a nucleic acid selected from the group consisting of:

(i) a nucleic acid of the invention and/or a nucleic acid complementary thereto, and
(ii) optionally a pharmaceutically acceptable carrier or excipient.

[0262] The nucleic acid sequences, alone or in combination with other nucleic acid sequences encoding antigens or antibodies or directed to other pathogenic microorganisms, may further be used as components of a pharmaceutical composition. The composition may be used for immunizing or treating humans and/or animals with the disease caused by infection with Klebsiella, preferably K. pneumoniae including the three subspecies pneumoniae, ozaenae and rhinoscleromatis, K. oxytoca, K. planticola, K. terrigena, and K. ornithinolytica, and more preferably from K. pneumoniae or K. oxytoca. The pharmaceutically acceptable carrier or excipient may be as defined above.

[0263] In another embodiment, the nucleic acid sequences of this invention, alone or in combination with nucleic acid sequences encoding other antigens or antibodies from other pathogenic microorganisms, may further be used in compositions directed to actively induce a protective immune response to the pathogen in a subject. These components of the present invention are useful in methods for inducing a protective immune response in humans and/or animals against infection with Klebsiella, preferably K. pneumoniae including the three subspecies pneumoniae, ozaenae and rhinoscleromatis, K. oxytoca, K. planticola, K. terrigena, and K. ornithinolytica, and more preferably from K. pneumoniae or K. oxytoca.

[0264] For use in the preparation of the therapeutic or vaccine compositions, nucleic acid delivery compositions and methods are useful, which are known to those of skill in the art. The nucleic acid of the invention may be employed in the methods of this invention or in the compositions described herein as DNA sequences, either administered as naked DNA, or associated with a pharmaceutically acceptable carrier and provide for in vivo expression of the antigen, peptide or polypeptide. So-called “naked DNA” may be used to express the antigen, peptide or polypeptide of the invention in vivo in a patient. (See, e.g., Cohen, J., 1993, which describes similar uses of “naked DNA”). For example, “naked DNA” associated with regulatory sequences may be administered therapeutically or as part of the vaccine composition e.g., by injection.

[0265] Alternatively, a nucleic acid encoding the antigens or peptides of the invention or a nucleic acid complementary thereto may be used within a pharmaceutical composition, e.g. in order to express the antigens or peptides or polypeptides of the invention in vivo, e.g., to induce antibodies.

[0266] A preferred embodiment of the invention relates to a pharmaceutical composition, wherein the nucleic acid according to the invention is comprised in a vector and/or a cell. Vectors and cells suitable in the context of the present invention are described above. Vectors are particularly employed for a DNA vaccine. An appropriate vector for delivery may be readily selected by one of skill in the art. Exemplary vectors for in vivo gene delivery are readily available from a variety of academic and commercial sources, and include, e.g., adeno-associated virus (International patent application No. PCT/US91/03440), adenovirus vectors (Kay, M. et al., 1994; Ishibashi, S. et al., 1993), or other viral vectors, e.g., various poxviruses, vaccinia, etc. Recombinant viral vectors, such as retroviruses or adenoviruses, are preferred for integrating the exogenous DNA into the chromosome of the cell.

[0267] The pharmaceutical compositions of the present invention may be administered in any effective, convenient manner including, for instance, administration by topical, oral, anal, vaginal, intravenous, intraperitoneal, intramuscular, subcutaneous, intranasal, intratracheal or intradermal routes among others.

[0268] In therapy or as a prophylactic, the active agent of the pharmaceutical composition of the present invention may be administered to an individual as an injectable composition, for example as a sterile aqueous dispersion, preferably isotonic.

[0269] Alternatively the composition, preferably the pharmaceutical composition may be formulated for topical application, for example in the form of ointments, creams, lotions, eye ointments, eye drops, ear drops, mouthwash, impregnated dressings and sutures and aerosols, and may contain appropriate conventional additives, including, for example, preservatives, solvents to assist drug penetration, and emollients in ointments and creams. Such topical formulations may also contain compatible conventional carriers, for example cream or ointment bases, and ethanol or oleyl alcohol for lotions. Such carriers may constitute from about 1% to about 98% by weight of the formulation; more usually they will constitute up to about 80% by weight of the formulation.

[0270] In addition to the therapy described above, the compositions of this invention may be used generally as a wound treatment agent to prevent adhesion of bacteria to matrix proteins exposed in wound tissue and for prophylactic use in dental treatment as an alternative to, or in conjunction with, antibiotic prophylaxis.

[0271] In a preferred embodiment the pharmaceutical composition is a vaccine composition. Preferably, such vaccine composition is conveniently in injectable form. Conventional adjuvants may be employed to enhance the immune response. A suitable unit dose for vaccination with a protein antigen is for adults between 0.02 to 3 μg antigen/per kg of body weight and for children between 0.2 to 10 μg antigen/per kg body weight, and such dose is preferably administered 1-3 times and with an interval of 2 to 24 weeks.

[0272] An “effective amount” or “therapeutically effective amount” of an antigen, nucleic acid, vector, an antibody or a pharmaceutical composition of the invention may be calculated as that amount capable of exhibiting an in vivo effect, e.g. preventing or ameliorating a sign or symptom of infection with Klebsiella, especially K. pneumoniae including the three subspecies pneumoniae, ozaenae and rhinoscleromatis, K. oxytoca, K. planticola, K. terrigena, and K. ornithinolytica, and more preferably from K. pneumoniae or K. oxytoca. Such amounts may be determined by one of skill in the art.

[0273] With the indicated dose range, no adverse toxicological effects are expected with the compounds of the invention, which would preclude their administration to suitable individuals.

[0274] In a further embodiment the present invention relates to diagnostic and pharmaceutical packs and kits comprising one or more containers filled with one or more of the ingredients of the aforementioned compositions of the invention. The ingredient(s) can be present in a useful amount, dosage, formulation or combination. Associated with such container(s) can be a notice in the form prescribed by a governmental agency regulating the preparation, use or sale of pharmaceuticals or biological products, reflecting approval by the agency of the preparation, use or sale of the product for human administration.

[0275] In connection with the present invention any disease related use as disclosed herein such as, e.g., use of the pharmaceutical composition or vaccine, is particularly a disease or diseased condition which is caused by, linked or associated with Klebsiella, more preferably any pathogenic Klebsiella species and especially K. pneumoniae including the three subspecies pneumoniae, ozaenae and rhinoscleromatis, K. oxytoca, K. planticola, K. terrigena, and K. ornithinolytica, and more preferably from K. pneumoniae or K. oxytoca. A disease related, caused or associated with the bacterial infection to be prevented and/or treated according to the present invention includes nosocomial infections. Common sites include the urinary tract, lower respiratory tract, biliary tract, and surgical wound sites. The spectrum of clinical syndromes includes pneumonia, bacteraemia, thrombophlebitis, urinary tract infection (UTI), cholecystitis, diarrhea, upper respiratory tract infection, wound infection, osteomyelitis, and meningitis.

[0276] It is within the present invention that each and any of the symptoms, diseases, disorders or syndromes described herein which are either directly or indirectly linked to or arise from a contact of an organism such as any animal or human with a Klebsiella species, more preferably a pathogenic Klebsiella species, and especially K. pneumoniae including the three subspecies pneumoniae, ozaenae and rhinoscleromatis, K. oxytoca, K. planticola, K. terrigena, and K. ornithinolytica, and more preferably from K. pneumoniae or K. oxytoca are separately and independently indications, diseases or disorders in the meaning of the present invention. Accordingly and just by means of illustration, a disease in the sense of the present application is septicaemia as well as meningitis and osteomyelitis.

[0277] It is within the present invention that the disease for which the various compounds described herein can be used are also those diseases where the polypeptide according to the present invention is expressed or any disease where the compounds described herein such as the polypeptides according to the present invention, the vaccine, the antibody, and any aptamer and spiegelmer, respectively, are suitable for the treatment and/or diagnosis thereof. Such potential use can arise from cross-reactivity and homology, respectively. It understood by the one skilled in the art that any disease described in connection with the pharmaceutical composition according to the present invention can be subject to the use of the pharmaceutical composition described herein, and vice versa.

[0278] Treatment in the context of the present invention refers to both therapeutic treatment and prophylactic or preventative measures, wherein the object is to prevent or slow down (lessen) the targeted pathologic condition or disorder. Those in need of treatment include those already with the disorder as well as those prone to have the disorder or those in whom the disorder is to be prevented.

[0279] In a still further embodiment the present invention is related to a screening method using any of the polypeptides according to the present invention or any of the nucleic acids according to the present invention. Screening methods as such are known to the one skilled in the art and can be designed such that an agonist or an antagonist is screened. In connection with such screening method preferably an antagonist is screened which in the present case inhibits or prevents the binding of any antigen and fragment thereof according to the present invention to an interaction partner. Such interaction partner can be a naturally occurring interaction partner or a non-naturally occurring interaction partner.

[0280] The invention also provides a method for screening compounds to identify those, which enhance (agonist) or block (antagonist) the function of the polypeptides according to the present invention or of the nucleic acid molecules of the present invention, such as its interaction with a binding molecule. The method of screening may involve high-throughput.

[0281] For example, to screen for agonists or antagonists, the interaction partner of the nucleic acid molecule and nucleic acid, respectively, according to the present invention, maybe a synthetic reaction mix, a cellular compartment, such as a membrane, cell envelope or cell wall, or a preparation of any thereof, may be prepared from a cell that expresses a molecule that binds to the polypeptides according to the present invention. The preparation is incubated with labelled forms of such polypeptides in the absence or the presence of a candidate molecule, which may be an agonist or antagonist. The ability of the candidate molecule to bind the binding molecule is reflected in decreased binding of the labelled ligand. Molecules which bind gratuitously, i.e., without inducing the functional effects of said polypeptides, are most likely to be good antagonists. Molecules that bind well and elicit functional effects that are the same as or closely related to the polypeptides according to the present invention are good agonists.

[0282] The functional effects of potential agonists and antagonists may be measured, for instance, by determining the activity of a reporter system following interaction of the candidate molecule with a cell or appropriate cell preparation, and comparing the effect with that of polypeptides according to the present invention or molecules that elicit the same effects as said polypeptides. Reporter systems that may be useful in this regard include but are not limited to colorimetric labelled substrate converted into product, a reporter gene that is responsive to changes in the functional activity of the polypeptides according to the present invention, and binding assays known in the art.

[0283] Another example of an assay for antagonists is a competitive assay that combines the polypeptides according to the present invention and a potential antagonist with membrane-bound binding molecules, recombinant binding molecules, natural substrates or ligands, or substrate or ligand mimetics, under appropriate conditions for a competitive inhibition assay. The polypeptides according to the present invention can be labelled such as by radioactivity or a colorimetric compound, such that the molecule number of polypeptides according to the present invention bound to a binding molecule or converted to product can be determined accurately to assess the effectiveness of the potential antagonist.

[0284] Potential antagonists include small organic molecules, peptides, polypeptides and antibodies that bind to polypeptides according to the present invention and thereby inhibit or extinguish its activity. Potential antagonists may also be small organic molecules, a peptide, a polypeptide such as a closely related protein or antibody that binds to the same sites on a binding molecule without inducing functional activity of the polypeptides according to the present invention.

[0285] Potential antagonists include a small molecule, which binds to and occupies the binding site of the polypeptides according to the present invention thereby preventing binding to cellular binding molecules, such that normal biological activity is prevented. Examples of small molecules include but are not limited to small organic molecules, peptides or peptide-like molecules.

[0286] Other potential antagonists include antisense molecules (see (Okano, H. et al., 1991); OLIGODEOXYNUCLEOTIDES AS ANTISENSE INHIBITORS OF GENE EXPRESSION; CRC Press, Boca Raton, Fla. (1988), for a description of these molecules).

[0287] Preferred potential antagonists include derivatives of the antigens and fragments thereof of the invention.

[0288] As used herein the activity of a polypeptide according to the present invention is its capability to bind to any of its interaction partner or the extent of such capability to bind to its or any interaction partner.

[0289] In a particular aspect, the invention provides the use of the polypeptides according to the present invention antigens and fragments thereof, nucleic acid molecules or inhibitors of the invention to interfere with the initial physical interaction between a pathogen and mammalian host responsible for sequelae of infection. In particular the molecules of the invention may be used: i) in the prevention of adhesion of the Klebsiella species as disclosed herein and more preferably the pathogenic species thereof, especially K. pneumoniae including the three subspecies pneumoniae, ozaenae and rhinoscleromatis, K. oxytoca, K. planticola, K. terrigena, and K. ornithinolytica, and more preferably from K. pneumoniae or K. oxytoca to mammalian extracellular matrix proteins; ii) to block bacterial adhesion between mammalian extracellular matrix proteins and bacterial proteins which mediate tissue reaction; iii) or lead to evasion of immune defence; iv) to block the normal progression of pathogenesis in infections initiated other than by the implantation of in-dwelling devices or by other surgical techniques, e.g. through inhibiting nutrient acquisition.

[0290] Each of the DNA coding sequences provided herein may be used in the discovery, development and/or preparation of antibacterial compounds. The encoded protein upon expression can be used as a target for the screening of antibacterial drugs. Additionally, the DNA sequences encoding the amino terminal regions of the encoded protein or Shine-Delgarno or other translation facilitating sequences of the respective mRNA can be used to construct antisense sequences to control the expression of the coding sequence of interest.

[0291] The antagonists and agonists may be employed, for instance, to inhibit diseases arising from infection with Klebsiella species, especially K. pneumoniae including the three subspecies pneumoniae, ozaenae and rhinoscleromatis, K. oxytoca, K. planticola, K. terrigena, and K. ornithinolytica, and more preferably from K. pneumoniae or K. oxytoca.

[0292] In a still further aspect the present invention is related to an affinity device such affinity device comprises as least a support material and any of the polypeptides according to the present invention, which is attached to the support material. Because of the specificity of said polypeptides for their target cells or target molecules or their interaction partners, said polypeptides allow a selective removal of their interaction partner(s) from any kind of sample applied to the support material provided that the conditions for binding are met. The sample may be a biological or medical sample, including but not limited to, fermentation broth, cell debris, cell preparation, tissue preparation, organ preparation, blood, urine, lymph liquid, liquor and the like.

[0293] The polypeptides according to the present invention may be attached to the matrix in a covalent or non-covalent manner. Suitable support material is known to the one skilled in the art and can be selected from the group comprising cellulose, silicon, glass, aluminium, paramagnetic beads, starch and dextrane.

[0294] The present invention is further illustrated by the following Figures, Tables, Examples and the Sequence Listing, from which further features, embodiments and advantages may be taken. It is to be understood that the present examples are given by way of illustration only and not by way of limitation of the disclosure.

[0295] In connection with the present invention

[0296] FIG. 1 shows the characterization of human sera as sources of pathogen specific antibodies.

[0297] FIG. 2 shows the characterization of the libraries.

[0298] FIG. 3 shows the selection of bacterial cells by MACS using biotinylated human IgGs.

[0299] FIG. 4 shows the PCR analysis to determine the gene distribution of a selected antigen in clinical isolates of the respective bacterial pathogen.

[0300] FIG. 5 shows examples for surface staining with epitope sera generated in mice.

[0301] FIG. 6 shows the protection conferred by active immunization with selected K. pneumoniae antigens in a mouse lethality model, when CFA/IFA was used as adjuvant.

[0302] FIG. 7 shows the protection conferred by active immunization with selected K. pneumoniae antigens in a mouse lethality model, when Alum was used as adjuvant.

[0303] FIG. 8 shows the protection conferred by active immunization with selected K. pneumoniae antigens in a mouse lethality model, when IC31® was used as adjuvant.

[0304] FIG. 9 shows the protection conferred by passive immunization with polyclonal rabbit sera raised against selected K. pneumoniae antigens in a mouse lethality model.

[0305] Table 1 shows the summary of all screens performed with genomic K. pneumoniae libraries and human serum.

[0306] Table 2 shows the strains used for gene distribution analysis.

[0307] Table 3 shows the summary of the gene distribution analysis for a selected number of antigens in various strains of the respective bacterial species.

[0308] Table 4 shows the summary of the peptide ELISA with human sera.

[0309] Table 5 Surface staining with epitope sera generated in mice.

[0310] Table 6 shows independent Klebsiella sp. isolates used to amplify genes of interest.

[0311] Table 7 shows the sequences of the oligonucleotides used to amplify genes of interest.

[0312] Table 8 Gene conservation of KPORF-13.

[0313] Table 9 Gene conservation of KPORF-21.

[0314] Table 10 Gene conservation of KPORF-32.

[0315] Table 11 Gene conservation of KPORF-37.

[0316] Table 12 Gene conservation of KPORF-38.

[0317] Table 13 Gene conservation of KPORF-39.

[0318] Table 14 Gene conservation of KPORF-60.

[0319] Table 15 Gene conservation of KPORF-65.

[0320] Table 16 Antigen fragments used for protection experiments.

[0321] The figures and tables to which it might be referred to in the specification are described in the following in more details.

[0322] FIG. 1 shows the characterization of human sera by measuring antibodies specific for K. pneumoniae by immune assays. Total IgG antibody levels were measured by standard ELISA. (A) total bacterial lysates prepared from K. pneumoniae strain Mich 61 and its respective capsule negative mutant. (B) total bacterial lysates prepared from K. pneumoniae strain 708 and its respective capsule negative mutant. Serum samples from healthy individuals and patients with septicaemia were analyzed at two different serum dilutions (1:1,000 and 1:5,000). P3536.2, P3495.2 and P3533.2 were convalescent sera obtained from patients after recovering from sickness. Results of the sera selected for the four different pools at a serum dilution of 1:1,000 are shown.

[0323] FIG. 2 (A) shows the fragment size distribution of the K. pneumoniae small fragment genomic library, KPL50 in pMAL4.31. After sequencing randomly selected clones, sequences were trimmed (476) to eliminate vector residues and the numbers of clones with various genomic fragment sizes were plotted. (B) shows the fragment size distribution of the K. pneumoniae large fragment genomic library, KPF300 in pMAL4.31. Sequences of randomly selected clones were trimmed (425) and the numbers of clones with various genomic fragment sizes were plotted.

[0324] FIG. 3 (A) shows the MACS selection with the biotinylated human IgG pool with sera from patients with septicaemia. The KPL50 library in pMAL9.1 was screened with 10-20 μg biotinylated IgG. As negative control, no serum was added to the library cells for screening. Number of cells selected after elution are shown. (B) shows the reactivity of specific clones (1-20) selected by bacterial surface display and Wt (pMAL9.1 without insert) as analyzed by immunoblot analysis with the human serum IgG pool (PKp34-IgG) used for selection by MACS at a dilution of 1:3,000. Asterisks indicate the clones detected as positive. As a loading control the same blot was also analyzed with antibodies directed against the platform protein LamB at a dilution of 1:5,000 (data not shown). (C) shows the MACS selection with the biotinylated human IgG pool with sera from patients with septicaemia (PKp35-IgG) and the KPF300 library in pHIE11. (D) shows the reactivity of specific clones (1-20) selected by bacterial surface display and Wt (pHIE11 without insert) as analyzed by immunoblot analysis with the human serum IgG pool (PKp35-IgG) used for selection by MACS at a dilution of 1:3,000. Asterisks indicate the clones detected as positive.

[0325] FIG. 4 shows an example for the PCR analysis for the gene distribution analysis of one gene with the respective oligonucleotides and 46 K. pneumoniae strains. The predicted size of the PCR fragment derived from antigen KPORF-54 from K. pneumoniae is 1040 bp. 1-46: strains or clinical isolates as shown in Table 2; −: no genomic DNA; +: genomic DNA of K. pneumoniae strain MGH78578.

[0326] FIG. 5 shows examples for surface staining with epitope sera generated in mice. Efficient surface display of three antigens on K. pneumoniae A5054 is shown. KPORF-28, KPORF-82 and KPORF-02 are examples for category “+”, 0-9%; “++”, 10-35% and “+++”, >36%. Percentage indicates the number of cells that showed a shift in the FACS analysis in comparison to cells incubated without immune sera.

[0327] FIGS. 6 (A), (B), (C), (D) and (E) show the protection achieved by active immunization with selected K. pneumoniae antigens in a mouse lethality model. CD-1 mice (10 mice per group) were immunized subcutaneously with recombinant antigens cloned from a K. pneumoniae strain MHG78578 and challenged with K. pneumoniae (O1:K2) strain B5055. Survival was monitored for 14 days post-challenge. Mice were immunized subcutaneously with 50 μg recombinant protein adjuvanted with CFA/IFA or IFA. Mice immunized with PBS combined with CFA/IFA or IFA were used as negative controls, while mice immunized with K. pneumoniae B5055 lysate (5 μg) served as a positive control. Mice were challenged intraperitoneally with 10³ CFU K. pneumoniae B5055. Numbers of surviving mice are plotted as percentage of total mice.

[0328] FIGS. 7 (A) and (B) show the protection conferred by active immunization with selected K. pneumoniae antigens in a mouse lethality model. CD-1 mice (10 mice per group) were immunized subcutaneously with recombinant antigens cloned from a K. pneumoniae strain MHG78578 and challenged with K. pneumoniae (O1:K2) strain B5055. Survival was monitored for 14 days post-challenge. Mice were immunized subcutaneously with 50 μg recombinant protein adjuvanted with Alum. Mice immunized with PBS combined with Alum were used as negative controls, while mice immunized with K. pneumoniae B5055 lysate (5 μg) combined with Alum served as a positive control. Mice were challenged intraperitoneally with 10³ CFU K. pneumoniae B5055. Numbers of surviving mice are plotted as a percentage of total mice.

[0329] FIGS. 8 (A) and (B) show the protection conferred by active immunization with selected K. pneumoniae antigens in a mouse lethality model. CD-1 mice (10 mice per group) were immunized subcutaneously with recombinant antigens cloned from a K. pneumoniae strain MHG78578 and challenged with K. pneumoniae (O1:K2) strain B5055. Survival was monitored for 14 days post-challenge. Mice were immunized subcutaneously with 50 μg recombinant protein adjuvanted with IC31®. Mice immunized with PBS combined with IC31® were used as negative controls, while mice immunized with K. pneumoniae B5055 lysate (5 μg) combined with IC31® served as a positive control. Mice were challenged intraperitoneally with 10³ CFU K. pneumoniae B5055. Numbers of surviving mice are plotted as a percentage of total mice.

[0330] FIGS. 9 (A) and (B) show the protection conferred by passive immunization with polyclonal rabbit sera raised against selected K. pneumoniae antigens in a mouse lethality model. CD-1 mice (10 mice per group) were immunized intraperitoneally with sera raised against recombinant antigens cloned from a K. pneumoniae strain MHG78578 and challenged with K. pneumoniae (O1:K2) strain B5055. Survival was monitored for 14 days post-challenge. Mice immunized with PBS sera were used as negative controls, while mice immunized with K. pneumoniae B5055 lysate sera (5 μg) served as a positive control. Mice were challenged intraperitoneally with 10³ CFU K. pneumoniae B5055. Numbers of surviving mice are plotted as a percentage of total mice.

TABLE 1
Immunogenic proteins identified from K. pneumoniae by bacterial surface display.

| | | | | | Location of | |
|---|---|---|---|---|---|---|
| | | | No. of | | identified | SeqID |
| | Putative function (by | Predicted | selected | Identified | immunogenic | (DNA, |
| ORF | homology) | immunogenic aa* | clones | in Screen | region (aa) | Prot.) |
| KPORF- | NADH | 11-27, 35-47, 68-107, | 2 | H | 180-226 | 17, |
| 01 | pyrophosphatase | 113-122, 124-136, | | | | 204 |
| | | 140-146, 152-164, | | | | |
| | | 168-174, 183-201, | | | | |
| | | 211-218, 228-243, | | | | |
| | | 246-253 | | | | |
| KPORF- | Lactoylglutathione | 13-31, 48-59, 69-91, | 2 | D | 46-105 | 18, |
| 02 | lyase and related | 109-115, 121-127 | | | | 205 |
| | lyases | | | | | |
| KPORF- | ABC-type Fe3+ | 12-44, 49-95, 102-145, | 3 | A | 273-286 | 19, |
| 03 | transport system, | 148-178, 184-229, | | | | 206 |
| | permease component | 233-244, 249-273, | | | | |
| | | 292-299, 304-329, | | | | |
| | | 334-348, 354-365, | | | | |
| | | 367-385, 394-426, | | | | |
| | | 428-440, 444-487, | | | | |
| | | 503-527, 531-539, | | | | |
| | | 546-554, 556-584 | | | | |
| KPORF- | Hypothetical | 7-17, 22-32, 34-41, | 2 | G | 211-269 | 20, |
| 04 | transcriptional | 55-77, 79-86, 93-111, | | | | 207 |
| | activator | 118-126, 131-148, | | | | |
| | | 152-162, 165-177, | | | | |
| | | 183-197, 213-220, | | | | |
| | | 234-250, 253-262, | | | | |
| | | 267-294 | | | | |
| KPORF- | 23S rRNA | 22-29, 41-56, 58-66, | 3 | H | 1-48 | 21, |
| 05 | pseudouridylate | 79-88, 94-121, | | | | 208 |
| | synthase | 124-131, 134-157, | | | | |
| | | 162-171, 173-180, | | | | |
| | | 189-197, 201-214, | | | | |
| | | 216-224, 242-254, | | | | |
| | | 257-270, 282-287, | | | | |
| | | 290-302, 309-315, | | | | |
| | | 320-325, 341-355, | | | | |
| | | 362-368, 372-378 | | | | |
| KPORF- | Glucosyltransferase | 5-15, 18-35, 48-61, | 2 | C | 31-83 | 22, |
| 06 | MdoH | 65-71, 112-119, | | | | 209 |
| | | 138-154, 157-169, | | | | |
| | | 179-208, 214-223, | | | | |
| | | 226-232, 243-250, | | | | |
| | | 256-262, 277-286, | | | | |
| | | 289-296, 338-348, | | | | |
| | | 352-363, 370-376, | | | | |
| | | 385-408, 420-436, | | | | |
| | | 443-454, 462-483, | | | | |
| | | 498-561, 563-592, | | | | |
| | | 600-642, 661-671, | | | | |
| | | 673-709, 714-733, | | | | |
| | | 748-754, 771-776, | | | | |
| | | 798-806, 808-821, | | | | |
| | | 823-839 | | | | |
| KPORF- | trp-repressor binding | 5-14, 21-26, 31-41, | 3 | H | 97-158 | 23, |
| 07 | protein | 59-77, 101-115, | | | | 210 |
| | | 132-145, 147-156, | | | | |
| | | 180-185, 188-197 | | | | |
| KPORF- | Putative | 6-18, 23-43, 45-56, | 2 | G | 521-583 | 24, |
| 08 | transcriptional | 69-80, 87-97, 112-123, | | | | 211 |
| | regulator | 135-151, 164-171, | | | | |
| | | 178-193, 200-227, | | | | |
| | | 249-258, 262-274, | | | | |
| | | 279-291, 302-308, | | | | |
| | | 322-327, 329-336, | | | | |
| | | 351-363, 366-373, | | | | |
| | | 384-399, 403-411, | | | | |
| | | 415-434, 440-446, | | | | |
| | | 461-482, 488-506, | | | | |
| | | 510-516, 518-551, | | | | |
| | | 574-589, 607-629, | | | | |
| | | 634-665, 667-687, | | | | |
| | | 694-712, 725-739, | | | | |
| | | 743-751, 753-768 | | | | |
| KPORF- | Zinc-containing | 4-13, 19-44, 55-63, | 3 | G | 11-76 | 25, |
| 09 | alcohol | 71-82, 89-110, 120-130, | | | | 212 |
| | dehydrogenase | 132-138, 145-161, | | | | |
| | | 168-182, 189-258, | | | | |
| | | 261-272, 278-288, | | | | |
| | | 290-301 | | | | |
| KPORF- | Putative inner | 4-22, 43-56, 63-68, | 2 | D | 383-428 | 26, |
| 10 | membrane protein | 81-90, 93-99, 139-148, | | | | 213 |
| | | 155-160, 170-176, | | | | |
| | | 189-195, 207-218, | | | | |
| | | 227-232, 241-249, | | | | |
| | | 251-258, 260-266, | | | | |
| | | 277-295, 300-327, | | | | |
| | | 329-336, 340-356, | | | | |
| | | 384-390, 418-423, | | | | |
| | | 427-433, 438-444 | | | | |
| KPORF- | Putative nucleotide- | 10-18, 32-37, 45-55, | 8 | E | 71-85 | 27, |
| 11 | utilizing enzyme | 60-69, 77-83, | | | | 214 |
| | related to | 89-95, 120-125, | | | | |
| | molybdopterin- | 133-170, 172-185, | | | | |
| | biosynthesis | 193-211, 214-223, | | | | |
| | | 232-249, 255-275, | | | | |
| | | 277-303, 305-310, | | | | |
| | | 320-328, 334-341, | | | | |
| | | 347-353, 355-369, | | | | |
| | | 380-386, 389-395 | | | | |
| KPORF- | ABC transporter | 4-23, 27-35, 67-73, | 2 | D | 39-110 | 28, |
| 12 | ATP-binding protein | 80-103, 117-126, | | | | 215 |
| | | 132-138, 140-159, | | | | |
| | | 162-171, 180-194, | | | | |
| | | 198-208, 211-218, | | | | |
| | | 228-234, 239-253, | | | | |
| | | 262-270, 272-291, | | | | |
| | | 296-305 | | | | |
| KPORF- | Periplasmic | 13-24, 27-34, 37-66, | 4 | D | 56-111, | 29, |
| 13 | glycerophosphodiester | 69-88, 99-104, | | | 199-261 | 216 |
| | phosphodiesterase | 149-155, 164-175, | | | | |
| | | 184-193, 199-209, | | | | |
| | | 227-235, 264-273, | | | | |
| | | 276-285, 288-315, | | | | |
| | | 323-335, 346-353 | | | | |
| KPORF- | Glucosamine- | 11-22, 25-48, 51-60, | 2 | G | 109-153 | 30, |
| 14 | fructose-6-phosphate | 64-72, 80-96, | | | | 217 |
| | aminotransferase | 108-122, 132-137, | | | | |
| | | 142-150, 152-167, | | | | |
| | | 175-199, 214-229, | | | | |
| | | 237-244, 252-258, | | | | |
| | | 260-266, 279-287, | | | | |
| | | 301-340, 345-350 | | | | |
| KPORF- | Isoleucine tRNA | 37-43, 50-57, 65-82, | 3 | G | 14-76, | 31, |
| 15 | synthetase | 87-109, 123-129, | | | 176-220 | 218 |
| | | 141-150, 152-157, | | | | |
| | | 166-172, 179-203, | | | | |
| | | 209-241, 249-284, | | | | |
| | | 290-300, 308-326, | | | | |
| | | 329-335, 345-357, | | | | |
| | | 359-368, 379-386, | | | | |
| | | 390-417, 420-425, | | | | |
| | | 438-444, 461-466, | | | | |
| | | 473-490, 497-505, | | | | |
| | | 524-534, 541-550, | | | | |
| | | 586-597, 608-614, | | | | |
| | | 622-632, 660-666, | | | | |
| | | 679-694, 696-706, | | | | |
| | | 708-722, 725-731, | | | | |
| | | 737-763, 784-789, | | | | |
| | | 810-825, 837-854, | | | | |
| | | 857-880, 882-895, | | | | |
| | | 901-907, 911-928 | | | | |
| KPORF- | Putative | 9-16, 38-52, 61-86, | 5 | H | 113-193 | 32, |
| 16 | oxidoreductase | 93-100, 110-117, | | | | 219 |
| | | 123-132, 138-145, | | | | |
| | | 151-169, 172-181, | | | | |
| | | 186-202, 208-225, | | | | |
| | | 227-253, 264-275, | | | | |
| | | 289-295, 320-329, | | | | |
| | | 335-342 | | | | |
| KPORF- | Putative | 11-18, 24-30, 42-49, | 2 | H | 490-547 | 33, |
| 17 | molybdopterin | 53-63, 69-80, | | | | 220 |
| | oxidoreductases | 87-93, 95-103, 144-171, | | | | |
| | | 173-185, 193-200, | | | | |
| | | 202-208, 215-221, | | | | |
| | | 242-261, 266-273, | | | | |
| | | 277-286, 290-299, | | | | |
| | | 322-328, 338-351, | | | | |
| | | 354-377, 391-409, | | | | |
| | | 441-451, 461-466, | | | | |
| | | 499-515, 521-527, | | | | |
| | | 562-569, 621-629, | | | | |
| | | 647-663, 676-682, | | | | |
| | | 694-701, 703-713, | | | | |
| | | 725-731, 735-744, | | | | |
| | | 755-764, 793-800 | | | | |
| KPORF- | Putative penicillin- | 4-11, 14-22, 38-70, | 4 | C | 417-489 | 34, |
| 18 | binding protein | 81-90, 97-114, 118-132, | | | | 221 |
| | | 147-171, 173-181, | | | | |
| | | 187-202, 244-250, | | | | |
| | | 252-298, 301-311, | | | | |
| | | 313-331, 342-368, | | | | |
| | | 410-418, 446-451, | | | | |
| | | 456-462, 468-474, | | | | |
| | | 476-492, 499-507, | | | | |
| | | 519-528, 552-565, | | | | |
| | | 568-575, 584-613, | | | | |
| | | 618-624, 626-649 | | | | |
| KPORF- | Putative secretion | 4-9, 32-53, 66-72, | 2 | G | 201-255 | 35, |
| 19 | protein (Multidrug | 74-90, 97-104, 110-130, | | | | 222 |
| | resistance efflux | 133-139, 144-152, | | | | |
| | pump) | 166-177, 203-213, | | | | |
| | | 215-241, 256-275, | | | | |
| | | 291-304, 307-316, | | | | |
| | | 321-326, 334-345, | | | | |
| | | 352-367 | | | | |
| KPORF- | Hypothetical protein, | 13-19, 26-43, 66-72, | 7 | C | 25-107 | 36, |
| 20 | no homology | 80-85, 95-101, | | | | 223 |
| | | 109-125, 131-137 | | | | |
| KPORF- | Regulator, OraA | 13-24, 35-43, 50-56, | 4 | D | 19-66 | 37, |
| 21 | protein | 58-68, 77-83, | | | | 224 |
| | | 104-110, 117-125, | | | | |
| | | 132-138, 140-153 | | | | |
| KPORF- | DNA mismatch | 15-31, 37-42, 47-54, | 2 | G | 576-623 | 38, |
| 22 | repair protein mutS | 68-87, 89-96, | | | | 225 |
| | | 107-117, 121-127, | | | | |
| | | 131-137, 145-151, | | | | |
| | | 176-182, 220-226, | | | | |
| | | 232-246, 250-257, | | | | |
| | | 291-300, 317-325, | | | | |
| | | 328-333, 337-359, | | | | |
| | | 368-393, 403-428, | | | | |
| | | 460-478, 480-493, | | | | |
| | | 500-506, 511-516, | | | | |
| | | 519-526, 528-559, | | | | |
| | | 565-572, 584-595, | | | | |
| | | 597-605, 608-613, | | | | |
| | | 626-648, 679-684, | | | | |
| | | 687-693, 703-714, | | | | |
| | | 718-735, 742-750, | | | | |
| | | 757-765, 768-788, | | | | |
| | | 793-799, 813-819, | | | | |
| | | 823-829, 839-850 | | | | |
| KPORF- | Hydrogenase | 10-35, 37-60, 63-76, | 2 | C | 275-339 | 39, |
| 23 | isoenzyme HypD | 79-86, 88-97, | | | | 226 |
| | | 108-113, 118-126, | | | | |
| | | 128-134, 138-145, | | | | |
| | | 153-159, 168-188, | | | | |
| | | 194-208, 211-243, | | | | |
| | | 255-260, 270-276, | | | | |
| | | 285-301, 307-346, | | | | |
| | | 348-367 | | | | |
| KPORF- | Selenocysteine lyase | 4-17, 21-33, 35-42, | 2 | H | 32-85 | 40, |
| 24 | | 47-64, 72-80, 85-92, | | | | 227 |
| | | 98-103, 125-147, | | | | |
| | | 151-161, 165-177, | | | | |
| | | 183-230, 232-246, | | | | |
| | | 256-262, 284-306, | | | | |
| | | 310-328, 331-367, | | | | |
| | | 369-383, 392-399 | | | | |
| KPORF- | Ribose-phosphate | 5-11, 18-27, 42-52, | 2 | H | 267-313 | 41, |
| 25 | pyrophosphokinase | 60-65, 75-84, 90-102, | | | | 228 |
| | | 107-116, 125-178, | | | | |
| | | 184-206, 221-233, | | | | |
| | | 235-242, 249-257, | | | | |
| | | 264-277, 288-317 | | | | |
| KPORF- | TonB | 5-11, 14-42, 50-75, | 8 | F | 85-114 | 42, |
| 26 | | 79-86, 89-98, 120-125, | | | | 229 |
| | | 152-160, 166-181, | | | | |
| | | 185-193, 200-207 | | | | |
| KPORF- | Putative phosphatase | 4-30, 36-43, 46-55, | 2 | D | 37-109 | 43, |
| 27 | | 63-111, 144-152, | | | | 230 |
| | | 159-168, 179-189, | | | | |
| | | 191-200, 205-213 | | | | |
| KPORF- | Similarity to | 20-45, 57-77, 80-100, | 7 | A | 266-296 | 44, |
| 28 | flavoprotein | 119-126, 131-137, | | | | 231 |
| | | 143-169, 179-185, | | | | |
| | | 195-203, 207-231, | | | | |
| | | 235-264, 282-302, | | | | |
| | | 320-329, 341-347, | | | | |
| | | 353-359, 361-373 | | | | |
| KPORF- | Outer membrane | 5-22, 24-37, 41-55, | 2 | H | 103-152 | 45, |
| 29 | channel protein | 57-65, 72-78, 90-103, | | | | 232 |
| | | 105-116, 119-130, | | | | |
| | | 164-170, 190-202, | | | | |
| | | 209-231, 244-254, | | | | |
| | | 260-276, 300-339, | | | | |
| | | 344-350, 355-376, | | | | |
| | | 389-397, 399-406, | | | | |
| | | 408-421, 429-437 | | | | |
| KPORF- | Membrane-bound | 8-16, 18-25, 31-47, | 3 | H | 405-468 | 46, |
| 30 | ATP synthase, F1 | 71-82, 87-102, 104-114, | | | | 233 |
| | sector, alpha-subunit | 126-156, 176-183, | | | | |
| | | 190-200, 205-212, | | | | |
| | | 218-228, 231-243, | | | | |
| | | 256-279, 287-301, | | | | |
| | | 303-312, 324-332, | | | | |
| | | 335-348, 351-357, | | | | |
| | | 365-380, 395-412, | | | | |
| | | 422-451, 456-464, | | | | |
| | | 467-483, 501-507 | | | | |
| KPORF- | Hypothetical protein | 4-18, 21-39, 46-56, | 2 | C | 317-401 | 47, |
| 31 | | 63-69, 72-86, 116-130, | | | | 234 |
| | | 132-160, 162-190, | | | | |
| | | 196-201, 209-231, | | | | |
| | | 233-241, 251-265, | | | | |
| | | 269-282, 292-298, | | | | |
| | | 309-324, 333-369, | | | | |
| | | 391-415, 417-427, | | | | |
| | | 436-454, 471-480, | | | | |
| | | 482-499, 510-518, | | | | |
| | | 521-533, 537-543, | | | | |
| | | 545-561, 571-581, | | | | |
| | | 585-597, 599-607, | | | | |
| | | 609-635, 638-643, | | | | |
| | | 650-665, 671-685, | | | | |
| | | 687-695, 701-707, | | | | |
| | | 710-720, 724-736, | | | | |
| | | 747-757, 764-769, | | | | |
| | | 772-784, 791-796, | | | | |
| | | 808-820 | | | | |
| KPORF- | Putative periplasmic | 4-12, 15-33, 58-77, | 2 | D | 159-218 | 48, |
| 32 | protein | 82-89, 98-106, 108-118, | | | | 235 |
| | | 120-135, 141-147, | | | | |
| | | 152-160, 168-215, | | | | |
| | | 225-233, 235-247, | | | | |
| | | 250-264, 284-312, | | | | |
| | | 314-321, 336-343, | | | | |
| | | 359-374, 386-394 | | | | |
| KPORF- | D-ribulose-5- | 4-16, 24-36, 40-47, | 5 | H | 126-203 | 49, |
| 33 | phosphate 3- | 49-56, 61-81, 84-143, | | | | 236 |
| | epimerase | 148-156, 158-164, | | | | |
| | | 170-175, 194-206, | | | | |
| | | 208-214 | | | | |
| KPORF- | Hypothetical protein | 28-45, 50-61, 94-111, | 2 | D | 549-630 | 50, |
| 34 | | 113-124, 137-142, | | | | 237 |
| | | 147-173, 180-188, | | | | |
| | | 190-196, 202-223, | | | | |
| | | 229-235, 239-249, | | | | |
| | | 262-270, 280-288, | | | | |
| | | 290-321, 325-332, | | | | |
| | | 347-355, 359-368, | | | | |
| | | 389-407, 415-427, | | | | |
| | | 429-453, 458-465, | | | | |
| | | 477-485, 499-505, | | | | |
| | | 516-527, 531-549, | | | | |
| | | 569-592, 594-602, | | | | |
| | | 605-615, 628-635, | | | | |
| | | 647-659, 662-683, | | | | |
| | | 727-735, 760-765, | | | | |
| | | 771-780, 788-809, | | | | |
| | | 811-818 | | | | |
| KPORF- | Hypothetical protein | 21-28, 33-40, 48-100, | 2 | H | 1-46 | 51, |
| 35 | | 104-111, 113-134 | | | | 238 |
| KPORF- | 30S ribosomal | 12-24, 31-41, 53-61, | 2 | H | 26-98 | 52, |
| 36 | subunit protein S5 | 73-87, 112-128, | | | | 239 |
| | | 133-140, 151-156 | | | | |
| KPORF- | Nitrite reductase | 4-9, 19-26, 32-56, | 2 | D | 790-834 | 53, |
| 37 | large subunit | 58-67, 71-81, 90-95, | | | | 240 |
| | | 97-105, 112-118, | | | | |
| | | 124-132, 138-144, | | | | |
| | | 147-167, 169-177, | | | | |
| | | 199-207, 212-217, | | | | |
| | | 231-241, 250-260, | | | | |
| | | 266-272, 274-282, | | | | |
| | | 289-296, 299-310, | | | | |
| | | 316-331, 344-350, | | | | |
| | | 352-363, 368-377, | | | | |
| | | 381-394, 399-406, | | | | |
| | | 412-450, 459-473, | | | | |
| | | 486-503, 508-514, | | | | |
| | | 518-548, 564-570, | | | | |
| | | 579-587, 602-608, | | | | |
| | | 616-623, 628-635, | | | | |
| | | 638-654, 678-688, | | | | |
| | | 691-696, 703-709, | | | | |
| | | 716-723, 761-772, | | | | |
| | | 784-793, 819-826, | | | | |
| | | 835-844 | | | | |
| KPORF- | Putative inner | 4-10, 18-36, 43-50, | 2 | A | 761-781 | 54, |
| 38 | membrane | 63-71, 75-105, 109-117, | | | | 241 |
| | lipoprotein | 134-140, 145-157, | | | | |
| | | 176-182, 184-201, | | | | |
| | | 203-211, 215-225, | | | | |
| | | 240-250, 262-284, | | | | |
| | | 294-309, 313-319, | | | | |
| | | 327-337, 350-356, | | | | |
| | | 361-367, 372-393, | | | | |
| | | 411-421, 428-451, | | | | |
| | | 453-466, 487-492, | | | | |
| | | 501-528, 535-553, | | | | |
| | | 564-574, 592-605, | | | | |
| | | 612-629, 631-640, | | | | |
| | | 646-653, 658-666, | | | | |
| | | 673-681, 713-718, | | | | |
| | | 720-730, 739-749, | | | | |
| | | 784-792, 821-826, | | | | |
| | | 833-844, 853-863, | | | | |
| | | 871-876, 885-894, | | | | |
| | | 900-918, 937-950, | | | | |
| | | 952-957, 972-990, | | | | |
| | | 995-1001, | | | | |
| | | 1024-1036, 1039-1044, | | | | |
| | | 1049-1055, | | | | |
| | | 1062-1089, 1091-1103, | | | | |
| | | 1110-1121, | | | | |
| | | 1123-1129, 1131-1151, | | | | |
| | | 1157-1179, | | | | |
| | | 1181-1201, 1204-1223, | | | | |
| | | 1233-1244, | | | | |
| | | 1269-1276, 1279-1286, | | | | |
| | | 1294-1301, | | | | |
| | | 1303-1309, 1315-1338, | | | | |
| | | 1350-1362, | | | | |
| | | 1373-1381, 1398-1406, | | | | |
| | | 1412-1423, | | | | |
| | | 1440-1446, 1458-1466, | | | | |
| | | 1481-1487, | | | | |
| | | 1492-1508, 1511-1518, | | | | |
| | | 1528-1534, | | | | |
| | | 1536-1547, 1553-1565, | | | | |
| | | 1606-1617, | | | | |
| | | 1619-1644 | | | | |
| KPORF- | Recombinational | 6-13, 31-38, 47-60, | 2 | H | 161-232 | 55, |
| 39 | DNA repair protein | 71-102, 107-123, | | | | 242 |
| | | 128-155, 173-179, | | | | |
| | | 185-194, 210-220 | | | | |
| KPORF- | Putative regulatory | 11-34, 36-43, 49-67, | 2 | G | 130-185 | 56, |
| 40 | protein | 74-79, 84-92, | | | | 243 |
| | | 94-100, 103-112, | | | | |
| | | 120-129, 134-155, | | | | |
| | | 162-173, 177-185, | | | | |
| | | 189-202, 206-211 | | | | |
| KPORF- | S- | 4-10, 20-35, 37-46, | 4 | H | 117-201 | 57, |
| 41 | adenosylmethionine | 48-55, 60-66, 75-82, | | | | 244 |
| | synthetase | 87-98, 133-150, | | | | |
| | | 166-172, 178-189, | | | | |
| | | 208-214, 230-235, | | | | |
| | | 245-251, 271-308, | | | | |
| | | 319-333, 335-355, | | | | |
| | | 373-380 | | | | |
| KPORF- | A/G-specific DNA | 4-30, 54-65, 91-105, | 1 | G | 249-323 | 58, |
| 42 | glycosylase | 107-131, 135-154, | | | | 245 |
| | | 163-192, 199-208, | | | | |
| | | 210-224, 229-239, | | | | |
| | | 248-257, 263-279, | | | | |
| | | 281-294, 328-354, | | | | |
| | | 373-379, 382-405, | | | | |
| | | 426-453, 462-487 | | | | |
| KPORF- | Hypothetical protein | 4-10, 12-24, 45-55, | 6 | E | 24-40 | 59, |
| 43 | | 75-88 | | | | 246 |
| KPORF- | Transketolase | 4-14, 20-37, 47-53, | 2 | D | 232-278 | 60, |
| 44 | | 55-61, 75-81, 97-103, | | | | 247 |
| | | 107-124, 129-135, | | | | |
| | | 139-147, 160-166, | | | | |
| | | 169-175, 181-190, | | | | |
| | | 202-221, 247-255, | | | | |
| | | 272-285, 300-310, | | | | |
| | | 318-332, 351-361, | | | | |
| | | 384-397, 406-427, | | | | |
| | | 442-449, 458-482, | | | | |
| | | 494-503, 512-524, | | | | |
| | | 531-539, 552-562, | | | | |
| | | 577-588, 590-596, | | | | |
| | | 600-608, 613-624, | | | | |
| | | 637-668, 692-700 | | | | |
| KPORF- | Putative S- | 33-39, 49-55, 68-84, | 4 | G, H | 63-115, | 61, |
| 45 | adenosylmethionine- | 90-96, 104-120, | | | 200-250 | 248 |
| | dependent | 126-143, 150-159, | | | | |
| | methyltransferase | 168-191, 197-208, | | | | |
| | | 219-225, 227-233, | | | | |
| | | 241-247 | | | | |
| KPORF- | Nucleoside- | 4-22, 24-34, 36-55, | 5 | G, H | 117-183 | 62, |
| 46 | diphosphate-sugar | 57-76, 83-97, 99-117, | | | | 249 |
| | epimerase | 135-143, 145-157, | | | | |
| | | 163-174, 178-198, | | | | |
| | | 200-207, 209-270, | | | | |
| | | 276-290, 321-335, | | | | |
| | | 338-347, 367-374, | | | | |
| | | 393-402, 404-411, | | | | |
| | | 416-422, 443-460, | | | | |
| | | 467-473 | | | | |
| KPORF- | Coenzyme F420- | 26-37, 44-52, 57-96, | 6 | G | 47-105 | 63, |
| 47 | dependent N5,N10- | 104-111, 118-124, | | | | 250 |
| | methylene | 155-177, 179-197, | | | | |
| | tetrahydromethanopterin | 201-214, 223-233, | | | | |
| | reductase and | 243-250, 257-262, | | | | |
| | related flavin- | 291-297, 303-314, | | | | |
| | dependent | 319-363 | | | | |
| | oxidoreductases | | | | | |
| KPORF- | ATP/GTP-binding | 36-43, 45-60, 76-97, | 2 | G | 118-163 | 64, |
| 48 | protein | 107-125, 131-156, | | | | 251 |
| | | 158-164 | | | | |
| KPORF- | ABC transporter, | 5-32, 40-50, 52-60, | 3 | D | 209-255 | 65, |
| 49 | substrate binding | 70-88, 92-101, 106-126, | | | | 252 |
| | protein | 138-150, 152-161, | | | | |
| | | 175-193, 201-234, | | | | |
| | | 237-248, 270-285, | | | | |
| | | 297-303, 312-318 | | | | |
| KPORF- | Putative PTS system | 4-12, 23-34, 49-55, | 2 | D | 62-113 | 66, |
| 50 | IIA component | 59-65, 70-81, 83-130 | | | | 253 |
| KPORF- | Putative phosphatase | 4-26, 38-49, 69-76, | 3 | D | 100-167 | 67, |
| 51 | | 82-96, 103-119, | | | | 254 |
| | | 126-140, 143-190, | | | | |
| | | 194-209, 212-218 | | | | |
| KPORF- | Putative lipoprotein | 7-29, 35-47, 56-66, | 18 | C | 75-176 | 68, |
| 52 | | 80-94, 97-123, 125-148, | | | | 255 |
| | | 150-160, 166-173, | | | | |
| | | 175-191, 193-200, | | | | |
| | | 207-225 | | | | |
| KPORF- | Conserved | 14-36, 39-45, 51-59, | 9 | G | 202-256 | 69, |
| 53 | hypothetical protein | 66-71, 76-88, | | | | 256 |
| | | 106-117, 121-126, | | | | |
| | | 140-157, 164-187, | | | | |
| | | 198-206, 210-252 | | | | |
| KPORF- | Membrane-bound | 4-19, 27-35, 90-107, | 2 | D | 130-178 | 70, |
| 54 | lytic murein | 120-134, 144-150, | | | | 257 |
| | transglycosylase d | 166-175, 192-198, | | | | |
| | precursor | 221-243, 249-255, | | | | |
| | | 263-278, 283-288, | | | | |
| | | 305-321, 324-334, | | | | |
| | | 342-349, 355-366, | | | | |
| | | 377-390, 413-425, | | | | |
| | | 442-448 | | | | |
| KPORF- | Similar to rRNA | 17-26, 41-51, 54-61, | 4 | D | 69-126 | 71, |
| 55 | methylases | 64-72, 78-105, | | | | 258 |
| | | 117-125, 127-137, | | | | |
| | | 147-155, 175-213, | | | | |
| | | 230-236, 238-261, | | | | |
| | | 271-277, 282-297, | | | | |
| | | 309-318, 329-347, | | | | |
| | | 355-372, 377-390 | | | | |
| KPORF- | Apolipoprotein N- | 4-48, 54-60, 62-69, | 2 | G | 226-282 | 72, |
| 56 | acyltransferase | 73-81, 88-115, 124-137, | | | | 259 |
| | | 139-154, 156-169, | | | | |
| | | 171-190, 194-231, | | | | |
| | | 240-273, 288-303, | | | | |
| | | 336-363, 367-395, | | | | |
| | | 405-411, 434-442, | | | | |
| | | 449-454, 466-483, | | | | |
| | | 491-507 | | | | |
| KPORF- | Putative carboxylase | 26-34, 39-47, 50-80, | 2 | D | 149-239 | 73, |
| 57 | | 82-88, 97-105, | | | | 260 |
| | | 108-127, 131-137, | | | | |
| | | 162-180, 185-191, | | | | |
| | | 198-203, 209-214, | | | | |
| | | 226-247, 256-288, | | | | |
| | | 296-305 | | | | |
| KPORF- | Putative transport | 5-28, 30-54, 73-84, | 2 | D | 6-62 | 74, |
| 58 | protein | 89-98, 109-116, | | | | 261 |
| | | 122-128, 137-142, | | | | |
| | | 163-189, 207-236, | | | | |
| | | 245-280, 288-390, | | | | |
| | | 404-423, 426-433, | | | | |
| | | 450-474, 487-504, | | | | |
| | | 506-513, 524-530, | | | | |
| | | 532-595, 605-614, | | | | |
| | | 620-626, 631-638, | | | | |
| | | 644-657, 667-683, | | | | |
| | | 686-693, 695-702, | | | | |
| | | 707-733, 739-747 | | | | |
| KPORF- | Similarity Anaerobic | 23-31, 39-50, 55-67, | 4 | A | 612-626 | 75, |
| 59 | dehydrogenases | 76-100, 117-130, | | | | 262 |
| | | 149-171, 173-185, | | | | |
| | | 218-238, 242-288, | | | | |
| | | 291-298, 334-346, | | | | |
| | | 355-369, 382-399, | | | | |
| | | 413-420, 431-438, | | | | |
| | | 442-449, 455-466, | | | | |
| | | 486-493, 498-508, | | | | |
| | | 524-531, 540-546, | | | | |
| | | 551-558, 562-570, | | | | |
| | | 575-582, 585-596, | | | | |
| | | 598-604, 621-630, | | | | |
| | | 632-650, 670-677, | | | | |
| | | 682-701, 736-749, | | | | |
| | | 755-761 | | | | |
| KPORF- | Similarity glutamine- | 4-21, 24-39, 44-68, | 2 | A | 126-148 | 76, |
| 60 | binding periplasmic | 74-81, 85-91, 109-116, | | | | 263 |
| | protein precursor | 129-138, 142-148, | | | | |
| | | 173-188, 195-201, | | | | |
| | | 207-212, 223-228 | | | | |
| KPORF- | Putative cytoplasmic | 4-17, 24-42, 61-67, | 7 | G, H | 1-49 | 77, |
| 61 | protein | 84-93, 96-102, 116-121, | | | | 264 |
| | | 135-143, 155-165, | | | | |
| | | 177-186, 210-224, | | | | |
| | | 253-259, 272-297, | | | | |
| | | 299-331, 337-351, | | | | |
| | | 359-367, 369-385 | | | | |
| KPORF- | Probable | 4-25, 28-54, 67-81, | 4 | G | 127-182 | 78, |
| 62 | transcriptional | 85-136, 138-143, | | | | 265 |
| | regulator | 157-170, 180-190, | | | | |
| | | 197-203, 205-214, | | | | |
| | | 219-243, 246-270, | | | | |
| | | 277-283, 290-299, | | | | |
| | | 305-311 | | | | |
| KPORF- | Hypothetical protein | 11-20, 25-33, 75-80, | 2 | D | 128-176 | 79, |
| 63 | | 85-91, 113-124, | | | | 266 |
| | | 143-155, 161-170, | | | | |
| | | 172-184 | | | | |
| KPORF- | Extracellular solute- | 4-9, 16-26, 28-34, | 26 | G | 48-106 | 80, |
| 64 | binding protein, | 55-80, 120-143, | | | | 267 |
| | family 3 | 150-156, 158-164, | | | | |
| | | 167-178, 185-190, | | | | |
| | | 192-213, 221-237, | | | | |
| | | 242-255, 257-272, | | | | |
| | | 281-290, 325-332 | | | | |
| KPORF- | Penicillin-binding | 13-48, 59-70, 78-88, | 4 | C | 410-466 | 81, |
| 65 | protein | 95-112, 129-151, | | | | 268 |
| | | 153-161, 163-182, | | | | |
| | | 214-221, 235-245, | | | | |
| | | 248-277, 281-291, | | | | |
| | | 293-301, 303-311, | | | | |
| | | 315-320, 323-346, | | | | |
| | | 377-383, 390-398, | | | | |
| | | 447-454, 474-487, | | | | |
| | | 491-512, 531-544, | | | | |
| | | 547-553, 582-590, | | | | |
| | | 597-603, 605-611, | | | | |
| | | 623-629 | | | | |
| KPORF- | Outer membrane | 6-26, 39-46, 48-58, | 2 | D | 152-206 | 82, |
| 66 | porin, receptor for | 69-75, 109-121, | | | | 269 |
| | ferric enterobactin | 139-144, 148-155, | | | | |
| | (enterochelin) and | 166-172, 215-221, | | | | |
| | colicins B and D | 261-267, 313-319, | | | | |
| | | 363-386, 423-433, | | | | |
| | | 447-458, 465-471, | | | | |
| | | 483-494, 497-517, | | | | |
| | | 558-565, 578-586, | | | | |
| | | 589-597, 619-626, | | | | |
| | | 636-645, 659-665, | | | | |
| | | 671-680, 682-693, | | | | |
| | | 733-739 | | | | |
| KPORF- | Hypothetical protein | 4-19, 23-35, 40-50, | 2 | H | 29-90 | 83, |
| 67 | | 52-58, 65-73, 78-103, | | | | 270 |
| | | 112-125, 146-160, | | | | |
| | | 163-192, 194-200 | | | | |
| KPORF- | Hypothetical protein | 4-13, 17-32, 40-50, | 2 | D | 90-170 | 84, |
| 68 | | 57-67, 76-81, 88-95, | | | | 271 |
| | | 107-119, 131-142, | | | | |
| | | 144-157, 171-178, | | | | |
| | | 185-193, 197-207, | | | | |
| | | 212-227, 231-238, | | | | |
| | | 248-253, 263-310 | | | | |
| KPORF- | 3-phytase precursor | 9-28, 57-82, 84-93, | 2 | D | 80-141 | 85, |
| 69 | | 126-135, 143-166, | | | | 272 |
| | | 173-194, 196-201, | | | | |
| | | 212-220, 228-254, | | | | |
| | | 269-277, 289-298, | | | | |
| | | 305-316, 320-327, | | | | |
| | | 330-337, 350-359, | | | | |
| | | 373-378, 386-392, | | | | |
| | | 403-411, 421-428, | | | | |
| | | 435-441, 443-458, | | | | |
| | | 465-470 | | | | |
| KPORF- | Cation/multidrug | 11-48, 54-67, 69-75, | 1 | H | 775-825 | 86, |
| 70 | efflux pump | 89-95, 101-122, | | | | 273 |
| | | 124-131, 134-157, | | | | |
| | | 159-175, 202-208, | | | | |
| | | 214-228, 258-270, | | | | |
| | | 272-280, 287-295, | | | | |
| | | 298-310, 331-338, | | | | |
| | | 340-417, 427-500, | | | | |
| | | 502-509, 534-552, | | | | |
| | | 556-561, 564-577, | | | | |
| | | 585-592, 594-608, | | | | |
| | | 621-627, 632-641, | | | | |
| | | 643-652, 671-681, | | | | |
| | | 683-709, 712-743, | | | | |
| | | 758-764, 776-783, | | | | |
| | | 789-820, 835-851, | | | | |
| | | 864-883, 885-910, | | | | |
| | | 913-940, 948-953, | | | | |
| | | 967-976, 994-1020 | | | | |
| KPORF- | ferric enterobactin | 14-24, 32-54, 58-63, | 5 | H | 10-59 | 87, |
| 71 | transport ATP- | 70-80, 93-100, | | | | 274 |
| | binding protein | 108-125, 127-135, | | | | |
| | | 142-153, 155-160, | | | | |
| | | 180-191, 201-208, | | | | |
| | | 210-216, 222-235, | | | | |
| | | 242-264, 267-273, | | | | |
| | | 276-282, 284-308 | | | | |
| KPORF- | ATP-dependent | 16-28, 44-68, 70-77, | 2 | D | 555-621 | 88, |
| 72 | protease La | 83-90, 99-129, | | | | 275 |
| | | 131-137, 145-154, | | | | |
| | | 161-175, 183-190, | | | | |
| | | 196-203, 205-220, | | | | |
| | | 238-245, 321-328, | | | | |
| | | 330-338, 366-379, | | | | |
| | | 383-397, 399-405, | | | | |
| | | 412-418, 442-458, | | | | |
| | | 471-483, 486-505, | | | | |
| | | 536-544, 562-568, | | | | |
| | | 583-602, 610-618, | | | | |
| | | 629-635, 641-655, | | | | |
| | | 672-682, 697-705, | | | | |
| | | 714-729, 744-751, | | | | |
| | | 755-762, 766-771, | | | | |
| | | 783-807 | | | | |
| KPORF- | Predicted Fe—S | 4-9, 20-34, 45-54, | 2 | D | 100-140 | 89, |
| 73 | oxidoreductase | 60-77, 79-89, 91-100, | | | | 276 |
| | | 102-149, 162-170, | | | | |
| | | 177-189, 193-208, | | | | |
| | | 210-222, 238-244, | | | | |
| | | 252-264, 267-276, | | | | |
| | | 302-307 | | | | |
| KPORF- | Probable | 11-27, 30-49, 56-62, | 10 | G, H | 73-137 | 90, |
| 74 | transcriptional | 69-74, 76-85, | | | | 277 |
| | regulator, LysR | 94-108, 116-125, | | | | |
| | family | 129-147, 153-161, | | | | |
| | | 165-171, 177-208, | | | | |
| | | 217-223, 225-231, | | | | |
| | | 237-255, 260-284, | | | | |
| | | 293-300 | | | | |
| KPORF- | Hypothetical protein | 4-38, 40-51, 84-97, | 2 | E | 727-740 | 91, |
| 75 | | 99-106, 109-115, | | | | 278 |
| | | 119-129, 131-145, | | | | |
| | | 148-160, 180-186, | | | | |
| | | 188-202, 230-243, | | | | |
| | | 246-267, 274-288, | | | | |
| | | 290-299, 302-312, | | | | |
| | | 317-327, 332-344, | | | | |
| | | 353-377, 381-388, | | | | |
| | | 407-419, 423-437, | | | | |
| | | 447-470, 474-482, | | | | |
| | | 486-494, 501-523, | | | | |
| | | 531-546, 551-556 | | | | |
| KPORF- | Hypothetical protein | 23-52, 62-76, 87-104, | 3 | C | 272-324 | 92, |
| 76 | | 109-115, 117-123, | | | | 279 |
| | | 129-139, 143-149, | | | | |
| | | 152-170, 172-191, | | | | |
| | | 199-205, 212-218, | | | | |
| | | 220-240, 249-256, | | | | |
| | | 263-275, 297-303, | | | | |
| | | 308-342, 349-380, | | | | |
| | | 382-394, 414-420, | | | | |
| | | 430-441, 446-452, | | | | |
| | | 460-475, 488-505, | | | | |
| | | 514-531, 533-539, | | | | |
| | | 546-568, 570-577, | | | | |
| | | 579-588, 613-625, | | | | |
| | | 632-670, 672-716, | | | | |
| | | 718-745, 759-769, | | | | |
| | | 785-798, 801-807 | | | | |
| KPORF- | Hypothetical protein, | 4-34, 36-43, 56-73, | 2 | C | 241-296 | 93, |
| 77 | (located as CRF in | 80-87, 101-134, | | | | 280 |
| | ABC transporter | 148-159, 161-170, | | | | |
| | substrate-binding | 178-185, 195-206, | | | | |
| | protein) | 211-221, 223-248, | | | | |
| | | 259-271, 276-295, | | | | |
| | | 297-308 | | | | |
| KPORF- | Maltoporin | 5-31, 44-50, 64-74, | 4 | E | 166-202 | 94, |
| 78 | | 86-94, 132-147, | | | | 281 |
| | | 154-167, 196-203, | | | | |
| | | 209-219, 253-260, | | | | |
| | | 284-289, 300-312, | | | | |
| | | 319-327, 335-340, | | | | |
| | | 358-364, 376-383 | | | | |
| KPORF- | Hypothetical protein | 4-9, 12-27, 29-71, | 3 | G | 317-364 | 95, |
| 79 | | 77-84, 90-108, 114-142, | | | | 282 |
| | | 147-164, 180-213, | | | | |
| | | 217-227, 229-282, | | | | |
| | | 291-309, 322-329, | | | | |
| | | 336-353, 365-370 | | | | |
| KPORF- | Methyl-accepting | 36-41, 52-66, 71-83, | 2 | H | 1-50 | 96, |
| 80 | chemotaxis protein | 89-95, 116-127, | | | | 283 |
| | | 154-174, 176-184, | | | | |
| | | 200-206, 230-237, | | | | |
| | | 248-259, 269-284, | | | | |
| | | 307-316, 376-383, | | | | |
| | | 399-418, 424-442, | | | | |
| | | 445-451, 454-462 | | | | |
| KPORF- | Type I restriction- | 9-14, 33-49, 64-72, | 4 | C | 212-244, | 97, |
| 81 | modification system | 87-92, 103-109, | | | 533-611 | 284 |
| | DNA methylase | 123-128, 130-141, | | | | |
| | | 143-154, 160-166, | | | | |
| | | 182-214, 237-247, | | | | |
| | | 251-260, 292-300, | | | | |
| | | 327-332, 337-350, | | | | |
| | | 357-365, 388-398, | | | | |
| | | 405-411, 422-428, | | | | |
| | | 451-459, 478-488, | | | | |
| | | 520-531, 534-540, | | | | |
| | | 558-564, 580-586, | | | | |
| | | 591-600, 605-615, | | | | |
| | | 629-635, 641-653, | | | | |
| | | 658-672 | | | | |
| KPORF- | Pyruvate | 4-10, 17-27, 30-37, | 2 | C | 277-324 | 98, |
| 82 | dehydrogenase E2 | 44-62, 80-85, 94-114, | | | | 285 |
| | component | 118-131, 134-141, | | | | |
| | | 148-161, 171-212, | | | | |
| | | 218-241, 248-261, | | | | |
| | | 274-313, 325-336, | | | | |
| | | 342-348, 359-373, | | | | |
| | | 391-397, 424-431, | | | | |
| | | 454-474, 489-495, | | | | |
| | | 497-503, 505-515, | | | | |
| | | 548-553, 560-580, | | | | |
| | | 591-610 | | | | |
| KPORF- | Sulfite reductase | 7-16, 18-24, 30-47, | 23 | H | 335-389 | 99, |
| 83 | [NADPH] | 49-70, 83-99, 103-117, | | | | 286 |
| | flavoprotein alpha- | 126-141, 146-153, | | | | |
| | component | 159-165, 177-194, | | | | |
| | | 198-221, 236-246, | | | | |
| | | 255-262, 273-279, | | | | |
| | | 283-296, 301-332, | | | | |
| | | 338-411, 422-428, | | | | |
| | | 434-440, 452-458, | | | | |
| | | 463-469, 494-509, | | | | |
| | | 511-517, 524-531, | | | | |
| | | 548-554, 564-572 | | | | |
| KPARF- | Hypothetical protein | 9-15, 33-54, 56-80, | 10 | G | 1-42 | 100, |
| 01 | | 102-108 | | | | 287 |
| KPARF- | Hypothetical protein | 15-36, 42-55, 58-68 | 83 | E, F | 54-77 | 101, |
| 02 | | | | | | 288 |
| KPARF- | Hypothetical protein | 55-75, 89-96, 98-110 | 51 | E, F | 14-36 | 102, |
| 03 | | | | | | 289 |
| KPARF- | Hypothetical protein | 8-14, 29-51, 73-101, | 31 | E, H | 70-114 | 103, |
| 04 | | 110-117 | | | | 290 |
| KPARF- | Hypothetical protein | 20-25, 29-34, 41-52, | 5 | H | 21-58 | 104, |
| 05 | | 60-67, 69-85, | | | | 291 |
| | | 90-100, 114-122, | | | | |
| | | 136-142, 160-170, | | | | |
| | | 174-181 | | | | |
| KPARF- | Hypothetical protein | 14-22 | 33 | E, F | 4-13 | 105, |
| 06 | | | | | | 292 |
| KPARF- | Hypothetical protein | 22-40, 54-66, 88-105, | 4 | G | 31-74 | 106, |
| 07 | | 109-118 | | | | 293 |
| KPARF- | Hypothetical protein | 5-11, 18-32, 47-60, | 14 | F | 118-129 | 107, |
| 08 | | 66-73, 83-92, 113-120, | | | | 294 |
| | | 126-141, 151-164, | | | | |
| | | 167-174, 201-211 | | | | |
| KPARF- | Hypothetical protein | 5-11, 18-24, 32-40, | 38 | E | 25-54 | 108, |
| 09 | | 47-53 | | | | 295 |
| KPARF- | Hypothetical protein | 18-24, 31-48 | 22 | H | 5-55 | 109, |
| 10 | | | | | | 296 |
| KPARF- | Hypothetical protein | 10-16, 26-32, 47-56, | 9 | G | 10-62 | 110, |
| 11 | | 85-95 | | | | 297 |
| KPARF- | Hypothetical protein | 4-12, 16-26 | 9 | F | 25-34 | 111, |
| 12 | | | | | | 298 |
| KPARF- | Hypothetical protein | 19-29, 45-51, 63-68, | 3 | H | 14-78 | 112, |
| 13 | | 76-92, 103-110, | | | | 299 |
| | | 114-120, 123-133, | | | | |
| | | 135-141 | | | | |
| KPARF- | Hypothetical protein | 4-18, 47-61 | 3 | E | 57-93 | 113, |
| 14 | | | | | | 300 |
| KPARF- | Hypothetical protein | 17-29, 44-50 | 5 | F | 26-38 | 114, |
| 15 | | | | | | 301 |
| KPARF- | Hypothetical protein | 5-19, 55-64, 78-85, | 2 | A | 24-33 | 115, |
| 16 | | 95-101, 104-112 | | | | 302 |
| KPARF- | Hypothetical protein | 4-10 | 3 | A | 12-31 | 116, |
| 17 | | | | | | 303 |
| KPARF- | Hypothetical protein | 4-12, 27-41, 43-58, | 3 | G | 13-65 | 117, |
| 18 | | 60-67, 76-86 | | | | 304 |
| KPARF- | Hypothetical protein | 30-38, 57-67 | 2 | F | 5-32 | 118, |
| 19 | | | | | | 305 |
| KPARF- | Hypothetical protein | 30-43 | 4 | A | 2-21 | 119, |
| 20 | | | | | | 306 |
| KPARF- | Hypothetical protein | 14-20, 23-36, 41-48 | 3 | C | 1-52 | 120, |
| 21 | | | | | | 307 |
| KPARF- | Hypothetical protein | 18-33, 51-58, 76-82 | 3 | B | 32-46 | 121, |
| 22 | | | | | | 308 |
| KPARF- | Hypothetical protein | 25-31 | 2 | E | 2-16 | 122, |
| 23 | | | | | | 309 |
| KPARF- | Hypothetical protein | 14-23, 50-58 | 3 | G | 9-49 | 123, |
| 24 | | | | | | 310 |
| KPARF- | Hypothetical protein | 4-10, 22-31, 35-45, | 2 | G | 17-66 | 124, |
| 25 | | 48-68, 71-80 | | | | 311 |
| KPARF- | Hypothetical protein | 4-24, 28-42, 46-56, | 3 | H | 2-46 | 125, |
| 26 | | 63-69, 87-94, 112-131 | | | | 312 |
| KPARF- | Hypothetical protein | 4-15, 19-28, 34-41, | 3 | E | 2-20 | 126, |
| 27 | | 52-62, 78-86 | | | | 313 |
| KPARF- | Hypothetical protein | 4-11, 16-30, 32-42 | 5 | H | 7-38 | 127, |
| 28 | | | | | | 314 |
| KPARF- | Hypothetical protein | 4-20, 22-31 | 7 | A | 22-38 | 128, |
| 29 | | | | | | 315 |
| KPARF- | Hypothetical protein | 4-19 | 3 | F | 17-32 | 129, |
| 30 | | | | | | 316 |
| KPARF- | Hypothetical protein | 7-13, 17-22, 27-33, | 2 | F | 26-40 | 130, |
| 31 | | 80-100 | | | | 317 |
| KPARF- | Hypothetical protein | 10-18, 22-48 | 2 | E | 32-44 | 131, |
| 32 | | | | | | 318 |
| KPARF- | Hypothetical protein | 15-24, 43-49, 73-83 | 2 | G | 45-93 | 132, |
| 33 | | | | | | 319 |
| KPARF- | Hypothetical protein | 22-29, 46-55, 57-63 | 3 | A | 5-17 | 133, |
| 34 | | | | | | 320 |
| KPARF- | Hypothetical protein | 10-33 | 2 | F | 21-35 | 134, |
| 35 | | | | | | 321 |
| KPARF- | Hypothetical protein | 16-24 | 2 | A | 22-49 | 135, |
| 36 | | | | | | 322 |
| KPARF- | Hypothetical protein | 4-16, 37-73, 76-110, | 2 | A | 2-30 | 136, |
| 37 | | 117-125, 127-132 | | | | 323 |
| KPARF- | Hypothetical protein | 4-12, 23-35, 44-56, | 2 | H | 22-76 | 137, |
| 38 | | 59-88 | | | | 324 |
| KPARF- | Hypothetical protein | 15-26 | 2 | F | 23-35 | 138, |
| 39 | | | | | | 325 |
| KPARF- | Hypothetical protein | 12-22, 31-40 | 2 | F | 17-44 | 139, |
| 40 | | | | | | 326 |
| KPARF- | Hypothetical protein | 4-9, 13-18, 29-35 | 2 | B | 57-64 | 140, |
| 41 | | | | | | 327 |
| KPARF- | Hypothetical protein | 31-55, 67-81 | 2 | H | 25-70 | 141, |
| 42 | | | | | | 328 |
| KPARF- | Hypothetical protein | 13-24, 51-58 | 2 | E | 13-26 | 142, |
| 43 | | | | | | 329 |
| KPARF- | Hypothetical protein | 6-20, 29-40, 57-79 | 3 | H | 46-88 | 143, |
| 44 | | | | | | 330 |
| KPARF- | Hypothetical protein | 8-14, 41-54, 68-76, | 3 | G | 12-72 | 144, |
| 45 | | 83-93, 106-126, | | | | 331 |
| | | 130-139 | | | | |
| KPARF- | Hypothetical protein | 5-13, 17-24, 41-55, | 5 | G | 53-88 | 145, |
| 46 | | 64-69, 80-85, 94-107, | | | | 332 |
| | | 109-115 | | | | |
| KPARF- | Hypothetical protein | 5-12, 32-54, 57-64 | 2 | A | 20-33 | 146, |
| 47 | | | | | | 333 |
| KPCRF- | Hypothetical protein | 4-16, 40-48, 50-58, | 5 | C | 68-128 | 147, |
| 01 | | 62-68, 75-85, 92-104, | | | | 334 |
| | | 108-116, 124-134 | | | | |
| KPCRF- | Hypothetical protein | 7-13, 19-29, 34-40, | 19 | D, F | 11-83 | 148, |
| 02 | | 54-71, 76-81, 91-144, | | | | 335 |
| | | 147-155, 157-188 | | | | |
| KPCRF- | Hypothetical protein | 17-24, 32-41 | 79 | A, E, F | 6-43 | 149, |
| 03 | | | | | | 336 |
| KPCRF- | Hypothetical protein | 14-31, 38-59, 69-87, | 11 | E | 63-78 | 150, |
| 04 | | 95-102, 126-146, | | | | 337 |
| | | 157-162, 177-193, | | | | |
| | | 201-227, 238-251 | | | | |
| KPCRF- | Hypothetical protein | 10-16, 18-25, 27-41, | 5 | H | 38-100 | 151, |
| 05 | | 43-52, 59-86, | | | | 338 |
| | | 94-101, 134-140 | | | | |
| KPCRF- | Hypothetical protein | 4-19, 23-35, 43-72, | 3 | H | 37-93 | 152, |
| 06 | | 78-92 | | | | 339 |
| KPCRF- | Hypothetical protein | 15-20, 27-32, 41-65, | 2 | C | 317-375 | 153, |
| 07 | | 69-82, 93-105, | | | | 340 |
| | | 107-115, 120-147, | | | | |
| | | 170-178, 184-201, | | | | |
| | | 214-257, 272-281, | | | | |
| | | 293-314, 332-339, | | | | |
| | | 358-364, 374-381, | | | | |
| | | 390-397, 399-414, | | | | |
| | | 428-460 | | | | |
| KPCRF- | Hypothetical protein | 11-28, 47-55, 59-68, | 2 | A | 144-158 | 154, |
| 08 | | 76-105, 108-116, | | | | 341 |
| | | 120-144, 146-160, | | | | |
| | | 167-175, 180-187, | | | | |
| | | 209-233 | | | | |
| KPCRF- | Hypothetical protein | 4-13, 58-78 | 31 | H | 14-77 | 155, |
| 09 | | | | | | 342 |
| KPCRF- | Hypothetical protein | 26-31, 44-49, 57-64, | 30 | A, E, F, G | 57-101 | 156, |
| 10 | | 67-74, 107-112, | | | | 343 |
| | | 116-152, 154-181, | | | | |
| | | 202-212, 241-255 | | | | |
| KPCRF- | Hypothetical protein | 10-41, 53-70, 81-93, | 21 | E, F | 84-95 | 157, |
| 11 | | 100-111, 137-147, | | | | 344 |
| | | 164-169, 183-190, | | | | |
| | | 199-210, 216-221, | | | | |
| | | 226-240 | | | | |
| KPCRF- | Hypothetical protein | 12-45, 48-56, 73-79, | 3 | F | 98-115 | 158, |
| 12 | | 91-103, 106-112, | | | | 345 |
| | | 117-125, 132-143, | | | | |
| | | 154-160, 178-201, | | | | |
| | | 208-214, 216-225, | | | | |
| | | 260-266, 276-283 | | | | |
| KPCRF- | Hypothetical protein | 4-15, 30-42 | 2 | B | 29-39 | 159, |
| 13 | | | | | | 346 |
| KPCRF- | Hypothetical protein | 22-53, 55-73, 80-88 | 3 | A | 33-66 | 160, |
| 14 | | | | | | 347 |
| KPCRF- | Hypothetical protein | 6-23, 44-54 | 7 | F | 56-67 | 161, |
| 15 | | | | | | 348 |
| KPCRF- | Hypothetical protein | 8-21, 35-44, 66-75, | 3 | C | 32-94 | 162, |
| 16 | | 82-87, 94-101 | | | | 349 |
| KPCRF- | Hypothetical protein | 8-20, 23-32, 36-50, | 4 | H | 15-69 | 163, |
| 17 | | 53-69 | | | | 350 |
| KPCRF- | Hypothetical protein | | 5 | F | 8-22 | 164, |
| 18 | | | | | | 351 |
| KPCRF- | Hypothetical protein | 31-37 | 5 | A | 2-31 | 165, |
| 19 | | | | | | 352 |
| KPCRF- | Hypothetical protein | 4-20, 23-39, 58-63, | 2 | D | 22-82 | 166, |
| 20 | | 71-78, 97-102 | | | | 353 |
| KPCRF- | Hypothetical protein | 23-44, 135-152, | 2 | C | 57-116 | 167, |
| 21 | | 168-184 | | | | 354 |
| KPCRF- | Hypothetical protein | 24-31, 42-50, 52-62, | 2 | D | 43-94 | 168, |
| 22 | | 93-117 | | | | 355 |
| KPCRF- | Hypothetical protein | 20-29 | 10 | E | 24-43 | 169, |
| 23 | | | | | | 356 |
| KPCRF- | Hypothetical protein | 12-57, 59-74 | 2 | A | 22-40 | 170, |
| 24 | | | | | | 357 |
| KPCRF- | Hypothetical protein | 7-16, 18-26, 39-45, | 2 | A | 65-82 | 171, |
| 25 | | 68-78, 86-92 | | | | 358 |
| KPCRF- | Hypothetical protein | 5-17, 19-34, 42-48, | 6 | H | 67-111 | 172, |
| 26 | | 56-71, 102-113, | | | | 359 |
| | | 118-129 | | | | |
| KPCRF- | Hypothetical protein | 4-33, 50-71 | 3 | D | 13-55 | 173, |
| 27 | | | | | | 360 |
| KPCRF- | Hypothetical protein | 9-17, 23-30, 37-54, | 2 | D | 5-70 | 174, |
| 28 | | 69-88, 96-102, 114-123, | | | | 361 |
| | | 130-140, 143-163 | | | | |
| KPCRF- | Hypothetical protein | 4-23, 27-52, 71-80 | 11 | C, H | 9-94 | 175, |
| 29 | | | | | | 362 |
| KPCRF- | Hypothetical protein | 13-19 | 5 | A | 2-21 | 176, |
| 30 | | | | | | 363 |
| KPCRF- | Hypothetical protein | 18-26, 28-52, 63-74, | 2 | D | 18-84 | 177, |
| 31 | | 94-107, 123-134 | | | | 364 |
| KPCRF- | Hypothetical protein | 19-33, 57-68 | 3 | A | 26-48 | 178, |
| 32 | | | | | | 365 |
| KPCRF- | Hypothetical protein | 4-26, 31-37, 42-59 | 7 | H | 12-65 | 179, |
| 33 | | | | | | 366 |
| KPCRF- | Hypothetical protein | 4-25 | 1 | A | 20-39 | 180, |
| 34 | | | | | | 367 |
| KPCRF- | Hypothetical protein | 40-51, 54-62, 67-75, | 3 | A | 31-42 | 181, |
| 35 | | 83-89, 126-146, | | | | 368 |
| | | 148-156 | | | | |
| KPCRF- | Hypothetical protein | 4-15, 23-33, 38-49, | 2 | H | 7-91 | 182, |
| 36 | | 82-98 | | | | 369 |
| KPCRF- | Hypothetical protein | 6-26, 36-57 | 2 | F | 40-64 | 183, |
| 37 | | | | | | 370 |
| KPCRF- | Hypothetical protein | 6-15, 21-28, 32-38, | 13 | H | 41-95 | 184, |
| 38 | | 57-65, 78-103, 114-134, | | | | 371 |
| | | 138-144, 154-163 | | | | |
| KPCRF- | Hypothetical protein | 13-30, 47-57, 71-76 | 2 | C | 25-71 | 185, |
| 39 | | | | | | 372 |
| KPCRF- | Hypothetical protein | 4-31, 43-51, 55-63, | 2 | F | 82-118 | 186, |
| 40 | | 67-72, 76-83, 88-95, | | | | 373 |
| | | 99-118, 125-132, | | | | |
| | | 134-159 | | | | |
| KPCRF- | Hypothetical protein | 4-17, 26-32, 34-40, | 2 | H | 41-97 | 187, |
| 41 | | 45-61, 67-92 | | | | 374 |

A, 50 bp library of K. pneumoniae in lamB with the ICKp18-IgG pool containing the IC38, IC40, IC76 and IC86 (562 trimmed clones),
B, 50 bp library of K. pneumoniae in lamB with the ICKp19-IgG pool containing the IC88, IC89, IC92 and IC93 sera (444 trimmed clones),
C, 300 bp library of K. pneumoniae in fhuA with the ICKp18-IgG pool containing the IC38, IC40, IC76 and IC86 sera (455 trimmed clones),
D, 300 bp library of K. pneumoniae in fhuA with the ICKp19-IgG pool containing the IC88, IC89, IC92, and IC93 sera (591 trimmed clones),
E, 50 bp library of K. pneumoniae in lamB with the PKp34 pool (P3536.2, P3548, P3560, P3582 and P3583 sera) (618 trimmed clones),
F, 50 bp library of K. pneumoniae in lamB with the PKp35 pool (P3495.2, P3533.2, P3567 and P3576 sera) (562 trimmed clones),
G, 300 bp library of K. pneumoniae in fhuA with the PKp34 pool (P3536.2, P3548, P3560, P3582 and P3583 sera) (562 trimmed clones),
H, 300 bp library of K. pneumoniae in fhuA with the PKp35 pool (P3495.2, P3533.2, P3567 and P3576 sera) (593 trimmed clones); P3536.2, P3495.2 and P3533.2 were convalescent sera obtained from patients after recovering from sickness,
*prediction of antigenic sequences longer than 5 amino acids was performed with the program ANTIGENIC (Kolaskar, A. et al., 1990). Listed are the genes from K. pneumoniae as identified by BLAST of the determined epitope sequence against the genomic sequence of K. pneumoniae MGH78578 (http://www.ncbi.nlm.nih.gov/genomes/lproks.cgi, http://pedant.gsf.de/).
The numbering of the ORFs is arbitrary.
The annotation/putative function was mainly obtained by homology to open reading frames from other bacterial species, preferentially Gram negative bacteria.

TABLE 2
List of strains used for gene distribution analysis.

| No | Strain ID | Species | K-type | O-type |
|---|---|---|---|---|
| 1 | A 5054 | K. pneumoniae | 1 | 1 |
| 2 | i252/94 | K. pneumoniae | 1 | 3 |
| 3 | B 5055 | K. pneumoniae | 2 | 1 |
| 4 | i225/94 | K. pneumoniae | 3 | 1 |
| 5 | C 5046 | K. pneumoniae | 3 | 2 |
| 6 | D 5050 | K. ozaenae | 4 | 2ac |
| 7 | E 5051 | K. ozaenae | 5 | 2ac |
| 8 | Aerogenes 4140 | K. pneumoniae | 7 | 1 |
| 9 | 1015 | K. planticola | 8 | 1 |
| 10 | i272/94 | K. pneumoniae | 8 | 3 |
| 11 | 919 | K. pneumoniae | 10 | 1 |
| 12 | 313 | K. pneumoniae | 12 | 1 |
| 13 | 1470 | K. pneumoniae | 13 | O− |
| 14 | 1193 | K. planticola | 14 | 5 |
| 15 | Mich61 | K. pneumoniae | 15 | 4 |
| 16 | 2069/49 | K. pneumoniae | 16 | 1 |
| 17 | i243/94 | K. pneumoniae | 16 | 3 |
| 18 | 1702/49 | K. pneumoniae | 21 | 1 |
| 19 | i202/94 | K. pneumoniae | 21 | 3 |
| 20 | 1680/49 | K. pneumoniae | 24 | 1 |
| 21 | i257/94 | K. pneumoniae | 24 | 9 |
| 22 | 2002/49 | K. pneumoniae | 25 | 3 |
| 23 | 6613 | K. pneumoniae | 27 | 2 |
| 24 | i192/94 | K. pneumoniae | 27 | 9 |
| 25 | 5758 | K. pneumoniae | 28 | 2 |
| 26 | 5725y | K. oxytoca | 29 | 1 |
| 27 | i219/94 | K. pneumoniae | 29 | 3 |
| 28 | 6258 | K. pneumoniae | 31 | 3 |
| 29 | 6168 | K. pneumoniae | 33 | 3 |
| 30 | i256/94 | K. pneumoniae | 38 | 3 |
| 31 | 8414 | K. pneumoniae | 38 | O− |
| 32 | 7749 | K. planticola | 39 | 1 |
| 33 | 5281 | K. pneumoniae | 46 | 1 |
| 34 | i224/94 | K. pneumoniae | 52 | 3 |
| 35 | 5759/50 | K. pneumoniae | 52 | O− |
| 36 | Stanley | K. planticola | 54 | 3 |
| 37 | i221/94 | K. pneumoniae | 57 | 3 |
| 38 | 4425/51 | K. planticola | 57 | 5 |
| 39 | 264-1 | K. pneumoniae | 67 | 7 |
| 40 | 265-1 | K. pneumoniae | 68 | 2 |
| 41 | i203/94 | K. pneumoniae | 68 | 3 |
| 42 | 889 | K. pneumoniae | 69 | 8 |
| 43 | 708 | K. pneumoniae | 80 | 12 |
| 44 | 370 | K. pneumoniae | 81 | O+ |
| 45 | Friedländer 204 | K. pneumoniae | K− | 1 |
| 46 | 5053 | K. ozaenae | K− | 2a, 2c |
| 47 | MGH78578 | K. pneumoniae | nd | nd |

Table 2 shows different strains of K. pneumoniae isolates analyzed for the gene distribution study. The species and the relevant K- and O-type are given. MGH78578 was used for generating genomic libraries.
nd, not determined.

TABLE 3
Gene distribution analysis for a selected number of antigens in
various Klebsiella species and K. pneumoniae strains.

| | SEQ ID NO | Gene |
|---|---|---|
| ORF | (DNA) | distribution |
| KPORF-01 | 17 | 46/46 |
| KPORF-02 | 18 | 36/46 |
| KPORF-03 | 19 | 12/46 |
| KPORF-04 | 20 | 42/46 |
| KPORF-05 | 21 | 46/46 |
| KPORF-06 | 22 | 17/46 |
| KPORF-07 | 23 | 41/46 |
| KPORF-08 | 24 | 5/46 |
| KPORF-09 | 25 | 41/46 |
| KPORF-10 | 26 | 43/46 |
| KPORF-11 | 27 | 46/46 |
| KPORF-12 | 28 | 22/46 |
| KPORF-13 | 29 | 43/46 |
| KPORF-14 | 30 | 45/46 |
| KPORF-15 | 31 | 40/46 |
| KPORF-16 | 32 | 32/46 |
| KPORF-17 | 33 | 34/46 |
| KPORF-18 | 34 | 39/46 |
| KPORF-19 | 35 | 24/46 |
| KPORF-20 | 36 | 39/46 |
| KPORF-21 | 37 | 43/46 |
| KPORF-22 | 38 | 27/46 |
| KPORF-23 | 39 | 4/46 |
| KPORF-24 | 40 | 28/46 |
| KPORF-25 | 41 | 46/46 |
| KPORF-26 | 42 | 35/46 |
| KPORF-27 | 43 | 43/46 |
| KPORF-28 | 44 | 41/46 |
| KPORF-29 | 45 | 40/46 |
| KPORF-30 | 46 | 46/46 |
| KPORF-31 | 47 | 46/46 |
| KPORF-32 | 48 | 46/46 |
| KPORF-33 | 49 | 46/46 |
| KPORF-34 | 50 | 38/46 |
| KPORF-35 | 51 | 39/46 |
| KPORF-36 | 52 | 46/46 |
| KPORF-37 | 53 | 46/46 |
| KPORF-38 | 54 | 41/46 |
| KPORF-39 | 55 | 39/46 |
| KPORF-40 | 56 | 38/46 |
| KPORF-41 | 57 | 39/46 |
| KPORF-42 | 58 | 46/46 |
| KPORF-43 | 59 | 37/46 |
| KPORF-44 | 60 | 45/46 |
| KPORF-45 | 61 | 46/46 |
| KPORF-46 | 62 | 39/46 |
| KPORF-47 | 63 | 1/46 |
| KPORF-48 | 64 | 39/46 |
| KPORF-49 | 65 | 46/46 |
| KPORF-50 | 66 | 46/46 |
| KPORF-51 | 67 | 7/46 |
| KPORF-52 | 68 | 7/46 |
| KPORF-53 | 69 | 46/46 |
| KPORF-54 | 70 | 46/46 |
| KPORF-55 | 71 | 46/46 |
| KPORF-56 | 72 | 44/46 |
| KPORF-57 | 73 | 40/46 |
| KPORF-58 | 74 | 42/46 |
| KPORF-59 | 75 | 17/46 |
| KPORF-60 | 76 | 46/46 |
| KPORF-61 | 77 | 44/46 |
| KPORF-62 | 78 | 43/46 |
| KPORF-63 | 79 | 35/46 |
| KPORF-64 | 80 | 40/46 |
| KPORF-65 | 81 | 46/46 |
| KPORF-66 | 82 | 42/46 |
| KPORF-67 | 83 | 18/46 |
| KPORF-68 | 84 | 37/46 |
| KPORF-69 | 85 | 5/46 |
| KPORF-70 | 86 | 42/46 |
| KPORF-71 | 87 | 39/46 |
| KPORF-72 | 88 | 43/46 |
| KPORF-73 | 89 | 41/46 |
| KPORF-74 | 90 | 36/46 |
| KPORF-75 | 91 | 31/46 |
| KPORF-76 | 92 | 38/46 |
| KPORF-77 | 93 | 37/46 |
| KPORF-78 | 94 | 40/46 |
| KPORF-79 | 95 | 4/46 |
| KPORF-80 | 96 | 4/46 |
| KPORF-81 | 97 | 2/46 |
| KPORF-82 | 98 | 46/46 |
| KPARF-01 | 100 | 37/46 |
| KPARF-04 | 103 | 40/46 |
| KPARF-05 | 104 | 46/46 |
| KPARF-07 | 106 | 43/46 |
| KPARF-08 | 107 | 40/46 |
| KPCRF-01 | 147 | 39/46 |
| KPCRF-02 | 148 | 1/46 |
| KPCRF-05 | 151 | 10/46 |
| KPCRF-06 | 152 | 45/46 |
| KPCRF-07 | 153 | 44/46 |
| KPCRF-08 | 154 | 36/46 |
| KPCRF-10 | 156 | 32/46 |
| KPCRF-12 | 158 | 34/46 |

46 Klebsiella strains plus MGH78578 as a positive PCR control as shown in Table 3 were tested by PCR with oligonucleotides specific for the genes encoding relevant antigens. The gene distribution table lists the number of positive PCR results from 46 strains for each gene and is an indication of the presence and conservation of the gene in diverse isolates of Klebsiella species.

TABLE 4
Peptide ELISA with peptides derived from K. pneumoniae antigens
Immune reactivity of individual synthetic peptides representing selected epitopes with individual
human sera is shown. Extent of reactivity is colour coded; white, < 0.05 OD units; light grey, 0.05-
0.2 OD units; dark grey, 0.2-0.4 OD units; black, > 0.4 OD units. The “Sum” represents the number
of sera, for which the OD_{405 nm} measurement was at least 0.05 OD units above the blank without
coating. Score is calculated as the sum of all reactivities (white = 0; light grey = 1; dark grey = 2;
black = 3). “From aa” and “To aa” denotes the position of the peptide relative to the full length
protein as listed under the respective sequence identification number (Seq ID No). ELISA
experiments were preformed with peptides derived from K. pneumoniae antigens and 22 high titer
human sera (P3494.2, P3495.2, P3518.2, P3533.2, P3536.2, P3545, P3548, P3560, P3567, P3571,
P3576, P3581, P3582, P3583, IC38, IC40, IC76, IC86, IC88, IC89, IC92 and IC93). P3494.2,
P3495.2, P3518.2, P3533.2 and P3536.2 are convalescent sera.

[chemical structure]

[chemical structure]

[chemical structure]

[chemical structure]

[chemical structure]

[chemical structure]

[chemical structure]

[chemical structure]

[chemical structure]

[chemical structure]

[chemical structure]

TABLE 5
Surface staining with epitope sera generated in mice.

| | | Location | | |
|---|---|---|---|---|
| | Seq ID | in | | |
| | NO | protein | | Friedländer |
| ORF | (Protein) | (aa) | A5054 | 204 |
| KPORF-02 | 205 | 46-105 | +++ | ++ |
| KPORF-13 | 216 | 56-111 | ++ | +++ |
| KPORF-20 | 223 | 25-107 | + | +++ |
| KPORF-21 | 224 | 19-66 | ++ | ++ |
| KPORF-26 | 229 | 85-114 | + | ++ |
| KPORF-27 | 230 | 37-109 | + | ++ |
| KPORF-28 | 231 | 266-296 | + | ++ |
| KPORF-29 | 232 | 103-152 | + | +++ |
| KPORF-32 | 235 | 167-218 | + | +++ |
| KPORF-37 | 240 | 790-834 | + | +++ |
| KPORF-38 | 241 | 761-781 | ++ | +++ |
| KPORF-39 | 242 | 176-232 | ++ | +++ |
| KPORF-41 | 244 | 117-201 | + | ++ |
| KPORF-42 | 245 | 249-323 | + | ++ |
| KPORF-44 | 247 | 232-278 | + | ++ |
| KPORF-49 | 252 | 209-255 | + | +++ |
| KPORF-52 | 255 | 75-176 | + | ++ |
| KPORF-53 | 256 | 202-256 | + | ++ |
| KPORF-54 | 257 | 130-178 | + | ++ |
| KPORF-55 | 258 | 69-126 | ++ | +++ |
| KPORF-60 | 263 | 126-148 | + | ++ |
| KPORF-61 | 264 | 1-49 | + | ++ |
| KPORF-62 | 265 | 127-182 | + | ++ |
| KPORF-64 | 267 | 48-106 | + | ++ |
| KPORF-65 | 268 | 410-466 | + | +++ |
| KPORF-66 | 269 | 152-206 | ++ | +++ |
| KPORF-72 | 275 | 555-621 | + | ++ |
| KPORF-78 | 281 | 166-202 | ++ | +++ |
| KPORF-79 | 282 | 317-364 | + | ++ |
| KPORF-80 | 283 | 1-50 | + | ++ |
| KPORF-82 | 285 | 277-324 | ++ | +++ |
| KPARF-03 | 289 | 14-36 | ++ | +++ |
| KPCRF-03 | 336 | 6-43 | ++ | +++ |
| KPCRF-10 | 343 | 57-101 | ++ | ++ |
| KPCRF-11 | 344 | 84-95 | +++ | +++ |
| KPCRF-12 | 345 | 98-115 | + | +++ |

The epitope specific antibodies generated in mice were tested in FACS analysis for binding to the surface of K. pneumoniae strain A5054 and Friedländer 204 cells.
The sera that showed a significant shift in FACS analysis are listed.
The extent of the shift is indicated by the number of “+”; +, 0-9%; ++, 10-35%, +++, >36%.
The percentage indicates the number of cells that showed a shift in the FACS analysis in comparison to cells incubated without immune sera.

TABLE 6
Klebsiella sp. strains utilized for the gene conservation analyses
of Klebsiella pneumoniae antigens.

| Number | Strain name | Species | K-Type | O-Type |
|---|---|---|---|---|
| 1 | A 5054 | K. pneumoniae | 1 | 1 |
| 2 | i252/94 | K. pneumoniae | 1 | 3 |
| 3 | B 5055 | K. pneumoniae | 2 | 1 |
| 4 | i225/94 | K. pneumoniae | 3 | 1 |
| 5 | D 5050 | K. ozaenae | 4 | 2ac |
| 6 | E 5051 | K. ozaenae | 5 | 2ac |
| 7 | Aerogenes4140 | K. pneumoniae | 7 | 1 |
| 8 | 1015 | K. planticola | 8 | 1 |
| 9 | i262/94 | K. pneumoniae | 9 | 3 |
| 10 | 919 | K. pneumoniae | 10 | 1 |
| 11 | 313 | K. pneumoniae | 12 | 1 |
| 12 | 1470 | K. pneumoniae | 13 | O− |
| 13 | 1193 | K. planticola | 14 | 5 |
| 14 | Mich61 | K. pneumoniae | 15 | 4 |
| 15 | 2069/49 | K. pneumoniae | 16 | 1 |
| 16 | i243/94 | K. pneumoniae | 16 | 3 |
| 17 | 2005/49 | K. pneumoniae | 17 | O− |
| 18 | 1754/49 | K. pneumoniae | 18 | 1 |
| 19 | 1702/49 | K. pneumoniae | 21 | 1 |
| 20 | i202/94 | K. pneumoniae | 21 | 3 |
| 21 | 1996/49 | K. pneumoniae | 22 | 1 |
| 22 | 1680/49 | K. pneumoniae | 24 | 1 |
| 23 | 2002/49 | K. pneumoniae | 25 | 3 |
| 24 | 6613 | K. pneumoniae | 27 | 2 |
| 25 | 5758 | K. pneumoniae | 28 | 2 |
| 26 | 5725y | K. oxytoca | 29 | 1 |
| 27 | 7824 | K. pneumoniae | 30 | 1 |
| 28 | 6258 | K. pneumoniae | 31 | 3 |
| 29 | 6168 | K. pneumoniae | 33 | 3 |
| 30 | i256/94 | K. pneumoniae | 38 | 3 |
| 31 | 7749 | K. planticola | 39 | 1 |
| 32 | 2482 | K. pneumoniae | 43 | 2 |
| 33 | 5281 | K. pneumoniae | 46 | 1 |
| 34 | i224/94 | K. pneumoniae | 52 | 3 |
| 35 | 1756/51 | K. planticola | 53 | 3 |
| 36 | Stanley | K. planticola | 54 | 3 |
| 37 | 3985/51 | K. pneumoniae | 55 | 3 |
| 38 | i221/94 | K. pneumoniae | 57 | 3 |
| 39 | 4463/52 | K. pneumoniae | 60 | 5 |
| 40 | 5710/52 | K. pneumoniae | 61 | 5 |
| 41 | 5711/52 | K. pneumoniae | 62 | 1 |
| 42 | 5845/52 | K. pneumoniae | 63 | 1 |
| 43 | NCTC8172 | K. pneumoniae | 64 | 1 |
| 44 | 264-1 | K. pneumoniae | 67 | 7 |
| 45 | 265-1 | K. pneumoniae | 68 | 2 |
| 46 | 889 | K. pneumoniae | 69 | 8 |
| 47 | 708 | K. pneumoniae | 80 | 12 |
| 48 | 370 | K. pneumoniae | 81 | O+ |
| 49 | Friedländer 204 | K. pneumoniae | K− | 1 |
| 50 | 5053 | K. ozaenae | K− | 2a, 2c |
| 51 | MGH78578 | K. pneumoniae | nd | nd |

TABLE 7
Oligonucleotides used for sequence conservation analyses. Shown are
the KPORFs and primer names, SEQ ID NOs, orientation of the primer
relative to the gene, the sequence, and the position relative to
the gene. Oligonucleotides were used for both PCR amplification
of the gene or gene fragment and subsequent sequence analyses.

| | | | | Position |
|---|---|---|---|---|
| | Primer | | | relative |
| ORF | name | Orientation | Sequence | to gene start |
| KPORF-13 | 210-5901 | sense | GTGCTGGCGGTTATCCTG | −83 to −66 |
| | (SEQ ID NO 377) | | | |
| | 210-5902 | antisense | GTTATTCCCGGGTCGAAATC | +1145 to 1164 |
| | (SEQ ID NO 378) | | | |
| KPORF-21 | 210-5903 | sense | ACGCAGAAGAAACCGAACAG | −89 to −70 |
| | (SEQ ID NO 379) | | | |
| | 210-5904 | antisense | CGACGGAATAAAGTGGGAAT | +549 to +568 |
| | (SEQ ID NO 380) | | | |
| KPORF-32 | 210-6097 | sense | GACCAGAGTGAAATATTTACAAAA | −52 to −29 |
| | (SEQ ID NO 381) | | | |
| | 210-6563 | antisense | GTTTATCGCCACGCTGAT | +1295 to +1312 |
| | (SEQ ID NO 382) | | | |
| KPORF-37 | 210-5905 | sense | GCCTGATGGCTGAATCGTTA | −54 to −35 |
| | (SEQ ID NO 383) | | | |
| | 210-5906 | antisense | GAGCAGCGTTTTGTTGTCG | +1089 to +1107 |
| | (SEQ ID NO 384) | | | |
| | 210-6345 | sense | CAAGCTGAAGCTGTTGGGTGTGGAC | +963 to 987 |
| | (SEQ ID NO 385) | | | |
| | 210-6346 | antisense | GGCGGTGCGGATGTAGAACATC | +2211 to 2232 |
| | (SEQ ID NO 386) | | | |
| | 210-5909 | sense | GGCTGGAACCTGTACGTTTG | +2101 to 2120 |
| | (SEQ ID NO 387) | | | |
| | 210-5910 | antisense | TCGTCGATGCTGCAGATATT | +2556 to 2575 |
| | (SEQ ID NO 388) | | | |
| KPORF-38 | 210-5911 | sense | CCGCTTCGTCACTGTTGAG | −44 to −26 |
| | (SEQ ID NO 389) | | | |
| | 210-5912 | antisense | TGACTGACAAAGGCGGAGAG | +652 to +671 |
| | (SEQ ID NO 390) | | | |
| | 210-5913 | sense | CGCTGAACGTCGATAATGTC | +599 to +618 |
| | (SEQ ID NO 391) | | | |
| | 210-5914 | antisense | GAACCACCTCGAGTTTCACC | +1296 to +1315 |
| | (SEQ ID NO 392) | | | |
| | 210-5915 | sense | CGCGCGATCTCTATCGTC | +1211 to +1228 |
| | (SEQ ID NO 393) | | | |
| | 210-5916 | antisense | GAGACCGGAGATCGCTTTTT | +2009 to +2028 |
| | (SEQ ID NO 394 | | | |
| | 210-5917 | sense | GCCGCGTTTGATATCGTCTA | +1969 to +1988 |
| | (SEQ ID NO 395) | | | |
| | 210-5918 | antisense | CGTTTTAACTCGTCGCCATC | +2881 to +2900 |
| | (SEQ ID NO 396) | | | |
| | 210-5919 | sense | GTGGATAGCGGGGTACTGAA | +2728 to +2747 |
| | (SEQ ID NO 397) | | | |
| | 210-2920 | antisense | GCCCCTCTCTATCCCATAGC | +3756 to +3775 |
| | (SEQ ID NO 398) | | | |
| | 210-5921 | sense | TAAAGGCGCTGGGCATTAG | +3650 to +3668 |
| | (SEQ ID NO 399) | | | |
| | 210-5922 | antisense | GGCTGACTGCCGGTATTACT | +4459 to +4478 |
| | (SEQ ID NO 400) | | | |
| | 210-5923 | sense | AACCAACGCCTTGTTCCTT | +4311 to +4329 |
| | (SEQ ID NO 401) | | | |
| | 210-5924 | antisense | GTGACCGGATAACGCCAGAC | +5176 to +5195 |
| | (SEQ ID NO 402) | | | |
| KPORF-39 | 210-5925 | sense | GTAAGGACATGCAGGAGATG | −132 to −113 |
| | (SEQ ID NO 403) | | | |
| | 210-5926 | antisense | GTAATATGGCGACGGTCTT | +892 to +910 |
| | (SEQ ID NO 404) | | | |
| KPORF-60 | 210-5927 | sense | CATTAGGCTAGTCGTTCTCG | −54 to −35 |
| | (SEQ ID NO 405) | | | |
| | 210-5928 | antisense | TACGTTCCTGTTACCGTGTC | +851 to +870 |
| | (SEQ ID NO 406) | | | |
| KPORF-65 | 210-6564 | sense | GACGTCAGTTTACTGGTAGGC | −206 to −186 |
| | (SEQ ID NO 407) | | | |
| | 210-6565 | antisense | TCTTTCAGCTGACGAATGAC | +703 to +722 |
| | (SEQ ID NO 408) | | | |
| | 210-6566 | sense | CTCGTAATAACGCTCTATACCC | +624 to +645 |
| | (SEQ ID NO 409) | | | |
| | 210-6567 | antisense | CAATAGCCGGAATGGATA | +1518 to +1535 |
| | (SEQ ID NO 410) | | | |
| | 210-6568 | sense | CTGATGATCCTGATTAACGAC | +1405 to +1425 |
| | (SEQ ID NO 411) | | | |
| | 210-6569 | antisense | CGATTTTACGCTCCATCAT | +2034 to +2052 |
| | (SEQ ID NO 412) | | | |

TABLE 8
Gene conservation of KPORF-13.

| | | Amino | | | | | Strains | Strains | Strains | Strains |
|---|---|---|---|---|---|---|---|---|---|---|
| Refer- | Align- | acid in | | | | | with | with | with | with |
| ence | ment | Refer- | AA | AA | AA | AA | respective | respective | respective | respective |
| position | position | ence | change¹ | change² | change³ | change⁴ | change¹ | change² | change³ | change⁴ |
| 2 | 2 | K | N | R | S | T | 313, i202/94, 6613, | 1680/49 | 1470 | i221/94 |
| | | | | | | | 5758, 4463/52 | | | |
| 3 | 3 | M | L | V | | | D5050 | 1470 | | |
| 4 | 4 | K | I | N | | | D5050 | 1470, | | |
| | | | | | | | | i221/94 | | |
| 5 | 5 | L | F | | | | 1470, i221/94 | | | |
| 6 | 6 | T | P | | | | 1470, i221/94 | | | |
| 7 | 7 | A | T | | | | i202/94 | | | |
| 10 | 10 | S | I | | | | 1470, i221/94 | | | |
| 11 | 11 | G | V | | | | 1470, 1680/49, i221/94 | | | |
| 12 | 12 | M | I | | | | A5054, 919, Mich61, | | | |
| | | | | | | | 2069/49, i224/94, | | | |
| | | | | | | | 5710/52, 708, | | | |
| | | | | | | | 370, 5053 | | | |
| 13 | 13 | I | M | | | | i202/94, 4463/52 | | | |
| 14 | 14 | L | P | | | | i221/94 | | | |
| 15 | 15 | S | A | | | | i202/94, 6613, | | | |
| | | | | | | | 5758, 4463/52 | | | |
| 17 | 17 | S | L | | | | 919 | | | |
| 18 | 18 | A | P | | | | 919, 5281 | | | |
| 24 | 24 | T | V | | | | 6613, 5758 | | | |
| 27 | 27 | D | E | | | | 6613, 5758 | | | |
| 29 | 29 | M | L | | | | 4463/52 | | | |
| 30 | 30 | V | D | | | | 6613, 4463/52 | | | |
| 56 | 56 | A | T | | | | Aerogenes4140, 1470, | | | |
| | | | | | | | 1996/49, 5711/52 | | | |
| 84 | 84 | D | N | | | | 1754/49 | | | |
| 88 | 88 | R | H | | | | 1680/49, 5281 | | | |
| 95 | 95 | K | Q | | | | 919, 1754/49, i202/94, | | | |
| | | | | | | | 1680/49, 5281, | | | |
| | | | | | | | i224/94, 4463/52 | | | |
| 107 | 107 | D | A | | | | D5050, E5051, | | | |
| | | | | | | | Aerogenes4140, | | | |
| | | | | | | | 1470, Mich61, 1754/49, | | | |
| | | | | | | | i202/94, 1996/49, | | | |
| | | | | | | | 6613, 5758, | | | |
| | | | | | | | 7749, i224/94, | | | |
| | | | | | | | 4463/52, 5711/52, 5053 | | | |
| 122 | 122 | N | D | | | | i202/94, 4463/52 | | | |
| 125 | 125 | N | Y | | | | 2005/49, Friedländer 204 | | | |
| 183 | 183 | A | T | | | | 2005/49, Friedländer 204 | | | |
| 249 | 249 | K | Q | | | | i202/94, 4463/52 | | | |
| 260 | 260 | K | Q | | | | 6613, 5758 | | | |
| 261 | 261 | P | S | | | | 4463/52 | | | |
| 330 | 330 | V | I | L | | | NCTC8172 | i202/94, | | |
| | | | | | | | | 6613,5758, | | |
| | | | | | | | | 4463/52 | | |
| 331 | 331 | L | V | | | | 1680/49 | | | |
| 333 | 333 | N | H | | | | 6613, 5758 | | | |
| 337 | 337 | V | A | | | | 1680/49 | | | |
| 338 | 338 | D | I | | | | 1680/49 | | | |
| 340 | 340 | L | V | | | | 1680/49 | | | |
| 341 | 341 | F | V | | | | 1680/49 | | | |
| 344 | 344 | F | L | | | | 6613 | | | |
| 346 | 346 | D | A | | | | 1470, 1680/49, 6613 | | | |
| 351 | 351 | F | L | | | | 1680/49 | | | |
| 352 | 352 | L | G | R | | | 1680/49, i221/94 | 6613 | | |
| 353 | 353 | D | H | N | | | 5281 | 1680/49 | | |
| 355 | 355 | K | I | N | | | 1680/49 | 5281 | | |
| 356 | 356 | R | H | L | Q | | A5054, D5050, | 1470, | i225/94, | |
| | | | | | | | E5051, 919, | 1680/49, | Aerogenes4140, | |
| | | | | | | | 1754/49, 6168, | i221/94 | 2005/49, 1702/49, | |
| | | | | | | | 7749 | | 1996/49, 2002/49, 6613, | |
| | | | | | | | | | 5758, 7824, 6258, | |
| | | | | | | | | | 3985/51, 5711/52, 708, | |
| | | | | | | | | | 370, Friedländer 204 | |

^{1,2,3,4}observed amino acid at respective position in any of the sequenced genes of the respective Klebsiella sp. strains in reference to Klebsiella pneumoniae MGH78578.

TABLE 9
Gene conservation of KPORF-21.

| | | Amino | | | | | Strains | Strains | Strains | Strains |
|---|---|---|---|---|---|---|---|---|---|---|
| Refer- | Align- | acid in | | | | | with | with | with | with |
| ence | ment | Refer- | AA | AA | AA | AA | respective | respective | respective | respective |
| position | position | ence | change¹ | change² | change³ | change⁴ | change¹ | change² | change³ | change⁴ |
| 1 | 1 | V | L | | | | 5725y, 264-1 | | | |
| 2 | 2 | P | T | | | | 264-1 | | | |
| 5 | 5 | E | D | | | | B5055, 2005/49, 1702/49, 7824, i224/94 | | | |
| 6 | 6 | P | A | S | T | | 7824 | 265-1, | 5725y, 264-1 | |
| | | | | | | | | 889 | | |
| 7 | 7 | S | T | | | | 889 | | | |
| 12 | 12 | G | D | | | | 5725y, 264-1 | | | |
| 36 | 36 | R | G | | | | i262/94 | | | |
| 39 | 39 | V | A | D | | | i262/94, i202/94, 5725y, Stanley, 4463/52, | 5710/52 | | |
| | | | | | | | 264-1, 265-1, 889 | | | |
| 43 | 43 | M | I | | | | 2005/49 | | | |
| 44 | 44 | S | G | | | | 265-1, 889 | | | |
| 52 | 52 | D | N | | | | 5725y | | | |
| 53 | 53 | V | A | | | | 919, 313, 6613, 5758, 6258, 6168, 3985/51, | | | |
| | | | | | | | i221/94, 5845/52 | | | |
| 54 | 54 | T | I | | | | 4463/52 | | | |
| 56 | 56 | D | E | | | | i262/94, i202/94, 5725y, 1756/51, Stanley, | | | |
| | | | | | | | 4463/52, 264-1, 265-1, 889 | | | |
| 58 | 58 | L | V | | | | 5725y, 264-1, 265-1, 889 | | | |
| 59 | 59 | E | D | | | | 5725y, 264-1, 265-1, 889 | | | |
| 60 | 60 | Q | K | N | R | | 264-1 | 5725y | 265-1, 889 | |
| 63 | 63 | A | E | | | | 5725y, 264-1 | | | |
| 68 | 68 | N | K | | | | 2005/49 | | | |
| 74 | 74 | N | E | H | Q | | 5725y, 264-1 | 1756/51, | 265-1, 889 | |
| | | | | | | | | Stanley | | |
| 78 | 78 | G | R | | | | 5725y, 264-1, 265-1, 889 | | | |
| 85 | 85 | S | G | | | | i262/94 | | | |
| 94 | 94 | I | V | | | | 5725y, 264-1 | | | |
| 99 | 99 | S | K | N | | | 5725y, 264-1 | 265-1, | | |
| | | | | | | | | 889 | | |
| 104 | 104 | A | S | | | | 5725y, 264-1 | | | |
| 106 | 106 | Q | E | | | | 5725y, 264-1, 265-1, 889 | | | |
| 107 | 107 | V | A | D | E | T | i202/94, 2482, 4463/52 | 1756/51, | 265-1, 889 | 5725y, |
| | | | | | | | | Stanley | | 264-1 |
| 108 | 108 | V | G | I | T | | 265-1, 889 | 5725y | 264-1 | |
| 109 | 109 | D | E | | | | i202/94, 5725y, 2482, Stanley, 4463/52, | | | |
| | | | | | | | 264-1, 265-1, 889 | | | |
| 110 | 110 | Q | A | R | | | 5725y, 264-1 | 265-1, | | |
| | | | | | | | | 889 | | |
| 114 | 114 | E | K | | | | A5054, Mich61, 6613, 5758, 5845/52, 708, | | | |
| | | | | | | | 370, 5053 | | | |
| 116 | 116 | D | E | | | | 5725y, 264-1, 265-1, 889 | | | |
| 118 | 118 | D | Y | | | | 5710/52 | | | |
| 120 | 120 | V | A | | | | 5725y, 264-1, 265-1, 889 | | | |
| 121 | 121 | S | L | Q | R | | 265-1, 889 | 5725y | 264-1 | |
| 122 | 122 | L | F | | | | B5055 | | | |
| 124 | 124 | R | K | | | | 5725y, 264-1, 265-1, 889 | | | |
| 125 | 125 | E | A | | | | i202/94, 4463/52 | | | |
| 133 | 133 | E | D | | | | 265-1, 889 | | | |
| 137 | 137 | S | T | | | | 5725y, 265-1, 889 | | | |
| 138 | 138 | A | V | | | | 5725y, 264-1, 265-1, 889 | | | |
| 140 | 140 | T | A | | | | i202/94, 5725y, 4463/52, 264-1, 265-1, 889 | | | |
| 145 | 145 | V | I | | | | i202/94, 5725y, 4463/52, 264-1, 265-1, 889 | | | |

^{1,2,3,4}observed amino acid at respective position in any of the sequenced genes of the respective Klebsiella sp. strains in reference to Klebsiella pneumoniae MGH78578.

TABLE 10
Gene conservation of KPORF-32.

| | | Amino | | | | Strains | Strains | Strains |
|---|---|---|---|---|---|---|---|---|
| Refer- | Align- | acid in | | | | with | with | with |
| ence | ment | Refer- | AA | AA | AA | respective | respective | respective |
| position | position | ence | change¹ | change² | change³ | change¹ | change² | change³ |
| 2 | 2 | E | V | | | A5054, 6613 | | |
| 4 | 4 | F | I | | | 6613 | | |
| 7 | 7 | I | V | | | A5054, B5055, 6613, 5281 | | |
| 9 | 9 | V | I | | | 4463/52 | | |
| 11 | 11 | A | D | | | i243/94 | | |
| 12 | 12 | G | R | | | i243/94 | | |
| 19 | 19 | A | T | | | i243/94 | | |
| 20 | 20 | A | P | | | i243/94 | | |
| 21 | 21 | Q | D | H | | i243/94 | i221/94, 5053 | |
| 24 | 24 | Q | P | | | i243/94 | | |
| 28 | 28 | R | H | | | 5845/52 | | |
| 32 | 32 | L | V | | | i243/94 | | |
| 34 | 34 | N | K | | | i243/94 | | |
| 36 | 36 | K | I | R | | i243/94 | 6613 | |
| 38 | 38 | P | M | | | i243/94 | | |
| 45 | 45 | S | A | | | i243/94 | | |
| 60 | 60 | T | A | | | A5054, B5055, i225/94, D5050, | | |
| | | | | | | E5051, Aerogenes4140, 1015, | | |
| | | | | | | Mich61, 2069/49, i243/94, 2005/49, | | |
| | | | | | | 1754/49, 1702/49, i202/94, 1996/49, | | |
| | | | | | | 1680/49, 2002/49, 6613, 5725y, | | |
| | | | | | | 7824, 6258, 6168, i256/94, 7749, | | |
| | | | | | | 2482, 5281, i224/94, 1756/51, | | |
| | | | | | | Stanley, 3985/51, i221/94, 4463/52, | | |
| | | | | | | 5710/52, 5711/52, 5845/52, | | |
| | | | | | | NCTC8172, 708, 370, 5053 | | |
| 75 | 75 | A | G | | | 5725y | | |
| 79 | 79 | Q | H | | | 5725y | | |
| 92 | 92 | A | P | | | 5725y | | |
| 93 | 93 | W | R | | | 5725y | | |
| 99 | 99 | G | R | | | 5725y | | |
| 112 | 112 | N | T | | | i202/94, 4463/52 | | |
| 119 | 119 | E | G | | | A5054 | | |
| 122 | 122 | G | D | | | D5050, E5051, i243/94, 1756/51, | | |
| | | | | | | Stanley | | |
| 124 | 124 | Q | E | | | 2482 | | |
| 133 | 133 | S | L | | | 5725y | | |
| 136 | 136 | R | H | S | | i224/94, 3985/51, NCTC8172 | 2069/49 | |
| 151 | 151 | M | A | T | V | i202/94, 4463/52 | i225/94, 2005/49 | A5054, Aerogenes4140, |
| | | | | | | | | 1015, Mich61, 1754/49, |
| | | | | | | | | 1702/49, 1996/49, |
| | | | | | | | | 1680/49, 2002/49, 6613, |
| | | | | | | | | 7824, 6258, 6168, i256/94, |
| | | | | | | | | 7749, 2482, i221/94, |
| | | | | | | | | 5710/52, 5845/52, 708, |
| | | | | | | | | 370, 5053 |
| 152 | 152 | T | A | | | i225/94, 2005/49 | | |
| 176 | 176 | V | I | | | i202/94, 4463/52 | | |
| 211 | 211 | S | T | | | 5725y | | |
| 229 | 229 | L | M | | | 5725y | | |
| 238 | 238 | P | T | | | 5725y | | |
| 240 | 240 | V | G | | | 5725y | | |
| 259 | 259 | P | T | | | 5725y | | |
| 262 | 262 | D | N | | | i243/94, i202/94, 1756/51, Stanley, | | |
| | | | | | | 4463/52 | | |
| 264 | 264 | D | E | | | i243/94, i202/94, 1756/51, Stanley, | | |
| | | | | | | 4463/52 | | |
| 265 | 265 | D | E | | | i202/94, 4463/52 | | |
| 268 | 268 | N | Y | | | 5725y | | |
| 272 | 272 | S | G | | | i202/94, 4463/52 | | |
| 276 | 276 | N | H | | | 5725y | | |
| 281 | 281 | N | K | | | 5725y | | |
| 286 | 286 | Q | P | | | 5725y | | |
| 294 | 294 | C | R | | | 5725y | | |
| 312 | 312 | R | P | | | 5725y | | |
| 315 | 315 | Q | L | | | 1754/49 | | |
| 316 | 316 | T | A | | | i202/94, 4463/52 | | |
| 320 | 320 | T | K | | | 5725y | | |
| 354 | 354 | M | T | | | i243/94 | | |
| 359 | 359 | A | G | | | 5725y | | |
| 360 | 360 | P | S | | | i243/94, 1756/51, Stanley | | |
| 363 | 363 | Y | F | S | | 4463/52 | 5725y | |
| 367 | 367 | E | D | | | 6613 | | |
| 368 | 368 | V | L | M | | 2069/49 | 1015, i243/94, 6613, | |
| | | | | | | | 5053 | |
| 371 | 371 | V | L | | | 5725y | | |
| 374 | 374 | W | R | | | i243/94 | | |
| 377 | 377 | G | R | | | i243/94 | | |
| 379 | 379 | N | K | | | i243/94 | | |
| 380 | 380 | F | T | | | i243/94 | | |
| 382 | 382 | W | S | | | i243/94 | | |
| 383 | 383 | A | P | | | 6613 | | |
| 387 | 387 | A | L | | | i243/94 | | |
| 388 | 388 | W | H | | | i243/94 | | |
| 390 | 390 | C | S | | | i243/94 | | |
| 391 | 391 | A | V | Y | | D5050 | i243/94 | |
| 394 | 394 | L | H | | | i243/94 | | |
| 395 | 395 | V | M | Q | | A5054 | i243/94 | |
| 397 | 397 | G | E | | | Aerogenes4140, 7824 | | |

^{1,2,3}observed amino acid at respective position in any of the sequenced genes of the respective Klebsiella sp. strains in reference to Klebsiella pneumoniae MGH78578.

TABLE 11
Gene conservation of KPORF-37.

| | | Amino | | | Strains | Strains |
|---|---|---|---|---|---|---|
| Refer- | Align- | acid in | | | with | with |
| ence | ment | Refer- | AA | AA | respective | respective |
| position | position | ence | change¹ | change² | change¹ | change² |
| 213 | 213 | I | V | | 2005/49 | |
| 218 | 218 | T | I | | i202/94, 4463/52 | |
| 225 | 225 | H | R | | i202/94, 4463/52 | |
| 254 | 254 | G | E | | D5050, E5051 | |
| 299 | 299 | M | T | | 1193 | |
| 364 | 364 | D | H | T | 1470 | NCTC8172 |
| 509 | 509 | D | G | | 1680/49 | |
| 513 | 513 | E | A | | i202/94, 4463/52 | |
| 523 | 523 | V | I | | i243/94, 1756/51 | |
| 551 | 551 | S | T | | i243/94, i202/94, 1756/51, 4463/52 | |
| 615 | 615 | E | K | | D5050, E5051 | |
| 618 | 618 | R | Q | | 1680/49 | |
| 727 | 727 | E | D | | A5054, B5055, D5050, E5051, 1015, 919, 313, 1470, Mich61, 2069/49, 2005/49, | |
| | | | | | 1754/49, 1996/49, 1680/49, 2002/49, 6613, 5758, 6258, 6168, i256/94, i224/94, i221/94, | |
| | | | | | 5710/52, 5711/52, 370, Friedländer 204, 5053 | |
| 731 | 731 | K | T | | i202/94, 4463/52 | |
| 792 | 792 | C | W | | 1680/49 | |
| 803 | 803 | A | T | | A5054 | |
| 827 | 827 | D | N | | 7749 | |
| 845 | 845 | E | K | | Aerogenes4140 | |
| 846 | 846 | K | N | | i243/94, 1756/51 | |
| 847 | 847 | A | V | | i243/94, 1756/51 | |

^{1,2}observed amino acid at respective position in any of the sequenced genes of the respective Klebsiella sp. strains in reference to Klebsiella pneumoniae MGH78578.

TABLE 12
Sequence length (in amino acids) as obtained by sequencing of
Klebsiella gene KPORF-38 from selected Klebsiella species
and strains. All sequences were determined from the first codon
(Start) to the indicated position.

| | Sequence | SEQ ID |
|---|---|---|
| Strain name | obtained (aa) | NO |
| MGH78578 | 1663 | 580 |
| A5054 | 1254 | 581 |
| i252/94 | 951 | 582 |
| B5055 | 1403 | 583 |
| i225/94 | 1454 | 584 |
| D5050 | 1492 | 585 |
| E5051 | 1463 | 586 |
| Aerogenes4140 | 1492 | 587 |
| 1015 | 1457 | 588 |
| i262/94 | 1489 | 589 |
| 919 | 1476 | 590 |
| 313 | 1490 | 591 |
| 1470 | 1490 | 592 |
| 1193 | 1492 | 593 |
| Mich61 | 1490 | 594 |
| 2069/49 | 1491 | 595 |
| 2005/49 | 1489 | 596 |
| 1702/49 | 1419 | 597 |
| 1996/49 | 1489 | 598 |
| 1680/49 | 1484 | 599 |
| 2002/49 | 1489 | 600 |
| 6613 | 1482 | 601 |
| 5758 | 1240 | 602 |
| 7824 | 1492 | 603 |
| 6258 | 1423 | 604 |
| 6168 | 1491 | 605 |
| i256/94 | 1489 | 606 |
| 7749 | 1492 | 607 |
| 2482 | 1492 | 608 |
| 5281 | 1492 | 609 |
| i224/94 | 1492 | 610 |
| i221/94 | 1487 | 611 |
| 5710/52 | 1489 | 612 |
| 5711/52 | 1490 | 613 |
| NCTC8172 | 1252 | 614 |
| 708 | 949 | 615 |
| Friedländer 204 | 1244 | 616 |
| 5053 | 1474 | 617 |

TABLE 13
Gene conservation of KPORF-39.

| | | Amino | | | Strains | Strains |
|---|---|---|---|---|---|---|
| Refer- | Align- | acid in | | | with | with |
| ence | ment | Refer- | AA | AA | respective | respective |
| position | position | ence | change¹ | change² | change¹ | change² |
| 1 | 1 | V | M | | 264-1 | |
| 2 | 2 | D | E | | 264-1, 265-1, 889 | |
| 45 | 45 | N | S | | 265-1, 889 | |
| 50 | 50 | L | F | | 265-1 | |
| 52 | 52 | P | S | | i256/94 | |
| 58 | 58 | V | L | | 264-1, 265-1, 889 | |
| 82 | 82 | S | N | | 6258, 3985/51 | |
| 96 | 96 | I | L | | 264-1, 265-1, 889 | |
| 117 | 117 | I | L | | 265-1, 889 | |
| 119 | 119 | A | S | | 264-1 | |
| 123 | 123 | A | T | | i252/94, i262/94, i243/94, 1756/51, Stanley, 4463/52 | |
| 126 | 126 | S | T | | 265-1, 889 | |
| 157 | 157 | P | A | | 264-1, 265-1, 889 | |
| 159 | 159 | D | S | | 265-1, 889 | |
| 161 | 161 | T | A | | 264-1 | |
| 176 | 176 | L | V | | 264-1 | |
| 182 | 182 | T | S | | 265-1, 889 | |
| 193 | 193 | S | N | | 265-1, 889 | |
| 199 | 199 | V | S | | 264-1, 265-1, 889 | |
| 201 | 201 | T | A | | 264-1, 265-1, 889 | |
| 213 | 213 | L | M | | 6613, 5758, 5710/52 | |
| 232 | 232 | M | I | | 265-1, 889 | |
| 234 | 234 | A | S | | i262/94, i243/94, 1756/51, Stanley | |
| 236 | 236 | K | A | | 264-1, 265-1, 889 | |
| 237 | 237 | A | P | T | 1756/51 | 1470 |
| 241 | 241 | N | K | | 264-1, 265-1, 889 | |
| 243 | 243 | N | K | | i202/94, 4463/52 | |
| 245 | 245 | D | E | | 265-1, 889 | |
| 245 | 246 | — | Q | | 889 | |

^{1,2}observed amino acid at respective position in any of the sequenced genes of the respective Klebsiella sp. strains in reference to Klebsiella pneumoniae MGH78578.

TABLE 14
Gene conservation of KPORF-60.

| | | Amino | | | | Strains | Strains | Strains |
|---|---|---|---|---|---|---|---|---|
| Refer- | Align- | acid in | | | | with | with | with |
| ence | ment | Refer- | AA | AA | AA | respective | respective | respective |
| position | position | ence | change¹ | change² | change³ | change¹ | change² | change³ |
| 5 | 5 | F | L | | | 265-1, 889 | | |
| 21 | 21 | H | Q | | | 265-1, 889 | | |
| 24 | 24 | N | D | E | T | D5050, 264-1 | 265-1, 889 | Stanley |
| 26 | 26 | T | Q | | | 265-1, 889 | | |
| 28 | 28 | V | I | | | 265-1, 889 | | |
| 66 | 66 | T | A | I | | 265-1, 889 | 6613 | |
| 95 | 95 | D | E | | | 265-1, 889 | | |
| 117 | 117 | N | K | | | 265-1, 889 | | |
| 138 | 138 | S | G | | | D5050, 264-1, 265-1, 889 | | |
| 192 | 192 | N | H | | | 265-1, 889 | | |
| 194 | 194 | K | Q | | | 265-1, 889 | | |
| 200 | 200 | E | D | | | D5050, 264-1, 265-1, 889 | | |
| 206 | 206 | N | S | | | 265-1, 889 | | |
| | | | | | | i252/94, D5050, i262/94, i243/94, i202/94, 1996/49, 1756/51, | | |
| 231 | 231 | D | E | | | Stanley, 4463/52, 264-1, 265-1, 889 | | |

^{1,2,3}observed amino acid at respective position in any of the sequenced genes of the respective Klebsiella sp. strains in reference to Klebsiella pneumoniae MGH78578.

TABLE 15
Gene conservation of KPORF-65.

| | | Amino | | |
|---|---|---|---|---|
| Reference | Alignment | acid in | AA | Strains with |
| position | position | Reference | change¹ | respective change¹ |
| 36 | 36 | I | V | i252/94, i262/94, i243/94, |
| | | | | 1756/51, Stanley |
| 48 | 48 | D | N | i252/94, i262/94, i243/94, |
| | | | | 1756/51, Stanley |
| 61 | 61 | L | P | E5051 |
| 100 | 100 | Q | H | i202/94 |
| 115 | 115 | D | E | i202/94 |
| 125 | 125 | R | P | i202/94 |
| 128 | 128 | R | A | i202/94 |
| 144 | 144 | A | V | i202/94 |
| 186 | 186 | D | H | i202/94 |
| 215 | 215 | E | D | i202/94 |
| 283 | 283 | I | V | i252/94, i262/94, i243/94, |
| | | | | 1756/51, Stanley |
| 303 | 303 | S | R | Stanley |
| 308 | 308 | A | G | i252/94, i262/94, i243/94, |
| | | | | i202/94, 1756/51, |
| | | | | Stanley, 4463/52 |
| 364 | 364 | E | D | i252/94, i262/94, i243/94, |
| | | | | 1756/51, Stanley |
| 376 | 376 | G | D | E5051 |
| 389 | 389 | D | G | Friedländer 204 |
| 405 | 405 | S | A | i202/94, 4463/52 |
| 422 | 422 | S | A | i202/94, 4463/52 |
| 471 | 471 | I | L | A5054 |
| 481 | 481 | P | S | 5725y |
| 497 | 497 | V | I | NCTC8172 |
| 511 | 511 | Y | F | 5725y |
| 516 | 516 | K | Q | Aerogenes4140 |
| 520 | 520 | Y | F | i252/94, D5050, i262/94, |
| | | | | i243/94, i202/94, 5725y, |
| | | | | 1756/51, Stanley, 4463/52 |
| 565 | 565 | S | A | D5050, 5725y |
| 589 | 589 | M | I | D5050, 5725y |
| 619 | 619 | T | N | D5050, 5725y |

¹observed amino acid at respective position in any of the sequenced genes of the respective Klebsiella sp. strains in reference to Klebsiella pneumoniae MGH78578.

TABLE 16
Overview over the antigen fragments used for
protection experiments (Example 8)

| | Seq-ID of | Seq-ID of full | Location in full |
|---|---|---|---|
| | fragment | length | length |
| Fragment name | DNA/protein | DNA/protein | aa from-to |
| KPORF-02.1 | 1/188 | 18/205 | 2-130 |
| KPORF-13.1 | 2/189 | 29/216 | 26-356 |
| KPORF-20.1 | 3/190 | 36/223 | 2-180 |
| KPORF-21.1 | 4/191 | 37/224 | 1-168 |
| KPORF-32.1 | 375/376 | 48/235 | 23-397 |
| KPORF-37.1 | 5/192 | 53/240 | 2-420 |
| KPORF-37.2 | 6/193 | 53/240 | 414-847 |
| KPORF-38.2 | 7/194 | 54/241 | 582-1099 |
| KPORF-39.1 | 8/195 | 55/242 | 1-245 |
| KPORF-44.1 | 9/196 | 60/247 | 24-703 |
| KPORF-49.1 | 10/197 | 65/252 | 23-328 |
| KPORF-60.1 | 11/198 | 76/263 | 23-248 |
| KPORF-64.1 | 12/199 | 80/267 | 2-335 |
| KPORF-65.1 | 13/200 | 81/268 | 38-633 |
| KPORF-66.1 | 14/201 | 82/269 | 26-742 |
| KPORF-78.1 | 15/202 | 94/281 | 26-429 |
| KPORF-82.1 | 16/203 | 98/285 | 1-632 |

### EXAMPLES

### Example 1

### General Screening Procedure for the Identification of the Peptides According to the Present Invention

[0331] The approach, which has been employed for the present invention, is based on the interaction of proteins or peptides encoded by K. pneumoniae with the antibodies present in human sera. The antibodies produced against K. pneumoniae by the human immune system and present in human sera are indicative of the in vivo expression of the antigenic proteins and their immunogenicity. In addition, the antigenic proteins as identified by the bacterial surface display expression libraries using pools of pre-selected sera, are processed in a second and third round of screening by individual selected or generated sera. Thus the present invention supplies an efficient, relevant, comprehensive set of antigens as a pharmaceutical composition, especially a vaccine preventing infections caused by K. pneumoniae .

[0332] In the antigen identification program for identifying a comprehensive set of antigens according to the present invention, at least two different bacterial surface expression libraries from K. pneumoniae are screened with several serum pools or plasma fractions (antibody pools). The antibody pools are derived from a serum collection, which has been tested against antigenic compounds of K. pneumoniae, such as whole cell, total extracts. Preferably, four pools of sera (with 17 individual samples) are used. Sera determined to have high ELISA titre have to react with multiple proteins in immunoblotting in order to be considered hyperimmune and therefore relevant in the screening method applied for the present invention.

[0333] The expression libraries as used in the present invention should allow expression of all potential antigens, e.g. derived from all secreted and surface proteins of K. pneumoniae. Bacterial surface display libraries will be represented by a recombinant library of a bacterial host displaying a (total) set of expressed peptide sequences of K. pneumoniae on two selected outer membrane proteins (LamB and FhuA) at the bacterial host membrane (Georgiou, G., 1997); (Etz, H. et al., 2001). One of the advantages of using recombinant expression libraries is that the identified antigens may be instantly produced by expression of the coding sequences of the screened and selected clones expressing the antigens without further recombinant DNA technology or cloning steps necessary.

[0334] The comprehensive set of antigens identified by the described program according to the present invention is analyzed further by one or more additional rounds of screening. Therefore individual antibody preparations or antibodies generated against selected peptides, which were identified as immunogenic are used. According to a preferred embodiment the individual antibody preparations for the second round of screening are derived from healthy adults and/or challenged adults who show an antibody titre above a certain minimum level, for example an antibody titre being higher than 80 percentile, preferably higher than 90 percentile, especially higher than 95 percentile of the human (patient or healthy individual) sera tested. Using such high titre individual antibody preparations in the second screening round allows a very selective identification of the antigens and fragments thereof from K. pneumoniae .

[0335] Following the comprehensive screening procedure, the selected antigenic proteins, expressed as recombinant proteins or in vitro translated products, in case it can not be expressed in prokaryotic expression systems, or the identified antigenic peptides (produced synthetically) are tested in a second screening by a series of ELISA and Western blotting assays for the assessment of their immunogenicity with a large human serum collection (minimum ˜20 healthy and patients sera).

[0336] It is important that the individual antibody preparations (which may also be the selected serum) allow a selective identification of the most promising candidates of all the antigens from all the promising candidates from the first round. Therefore, preferably at least 10 individual antibody preparations (i.e. antibody preparations (e.g. sera) from at least 10 different individuals exposed to the chosen pathogen) should be used in identifying these antigens in the second screening round. Of course, it is possible to use also less than 10 individual preparations, however, selectivity of the step may not be optimal with a low number of individual antibody preparations. On the other hand, if a given antigen (or an antigenic fragment thereof) is recognized by at least 10 individual antibody preparations, preferably at least 30, especially at least 50 individual antibody preparations, identification of the antigen is also selective enough for a proper identification. Serum-reactivity may of course be tested with as many individual preparations as possible (e.g. with more than 100 or even with more than 1,000).

[0337] Therefore, the relevant portion of the serum-reactive antibody preparations according to the method of the present invention should preferably be at least 10, more preferably at least 30, especially at least 50 individual antibody preparations. Alternatively (or in combination) antigens may preferably be also identified with at least 20%, preferably at least 30%, especially at least 40% of all individual antibody preparations used in the second screening round.

[0338] According to a preferred embodiment of the present invention, the sera from which the individual antibody preparations for the second round of screening are prepared (or which are used as antibody preparations), are selected by their titre against K. pneumoniae (e.g. against a preparation of this pathogen, such as a lysate, cell wall components and recombinant proteins). Preferably, some are selected with an IgG titre above 1,000 U, especially above 5,000 U (U=units, calculated from the OD₄₀₅ₙₘ reading at a given dilution) when the whole organism (total lysate or whole cells) is used as antigen in the ELISA.

[0339] The antibodies produced against K. pneumoniae by the human immune system and present in human sera are indicative of the in vivo expression of the antigenic proteins and their immunogenicity. The recognition of linear epitopes recognized by serum antibodies can be based on sequences as short as 4-5 amino acids. Of course it does not necessarily mean that these short peptides are capable of inducing the given antibody in vivo. For that reason the defined epitopes, polypeptides and proteins are further to be tested in animals (mainly in mice) for their capacity to induce antibodies against the selected proteins in vivo.

[0340] The preferred antigens are located on the cell surface or secreted, and are therefore accessible extracellularly. Antibodies against cell wall proteins are expected to serve multiple purposes: to inhibit adhesion, to interfere with nutrient acquisition, to inhibit immune evasion and to promote phagocytosis (Hornef, M. et al., 2002). Antibodies against secreted proteins are beneficial in neutralisation of their function as toxin or virulence component. It is also known that bacteria communicate with each other through secreted proteins. Neutralizing antibodies against these proteins will interrupt growth-promoting cross-talk between or within infection causing pathogen species. Bioinformatic analyses (signal sequences, cell wall localisation signals, transmembrane domains) proved to be very useful in assessing cell surface localisation or secretion. The experimental approach includes the isolation of antibodies with the corresponding epitopes and proteins from human serum, and the generation of immune sera in mice against (poly) peptides selected by the bacterial surface display screens. These sera are then used in a third round of screening as reagents in at least one of the following assays: cell surface staining of K. pneumoniae grown under different conditions (FACS or microscopy), determination of neutralizing capacity (toxin, adherence), and promotion of opsonization and phagocytosis (in vitro phagocytosis assay).

[0341] For that purpose, bacterial E. coli clones are directly injected into mice and immune sera are taken and tested in the relevant in vitro assay. Alternatively, specific antibodies may be purified from human or mouse sera using peptides or proteins as substrate.

[0342] According to the antigen identification method used herein, the present invention can surprisingly provide a set of comprehensive novel nucleic acids and novel antigens, variants and fragments thereof of K. pneumoniae, among other things, as described herein. The nucleotide sequences according to the present invention encoding antigens preferably have a nucleotide sequence which is individually set forth in Seq ID Nos 1 to 187 and Seq ID No 375, whereby the corresponding encoded amino acid sequences preferably have an amino acid sequence as set forth in Seq ID Nos 188 to 374 and Seq ID No 376.

[0343] All linear fragments of a particular antigen may be identified by analysing the entire sequence of the protein antigen by a set of peptides overlapping by 1 amino acid with a length of at least 10 amino acids. Subsequently, non-linear epitopes can be identified by analysis of the protein antigen with hyperimmune sera using the expressed full-length protein or domain polypeptides thereof. Assuming that a distinct domain of a protein is sufficient to form the 3D structure independent from the native protein, the analysis of the respective recombinant or synthetically produced domain polypeptide with hyperimmune serum would allow the identification of conformational epitopes within the individual domains of multi-domain proteins. For those antigens where a domain possesses linear as well as conformational epitopes, competition experiments with peptides corresponding to the linear epitopes may be used to confirm the presence of conformational epitopes.

### Example 2

### Characterization and Selection of Human Serum Samples Based on Anti-Klebsiella Antibodies and Preparation of Antibody Screening Reagents

### Experimental Procedures

[0344] Enzyme linked immunosorbent assay (ELISA). ELISA plates (Maxisorb, Millipore) were coated with 5-10 μg/ml total protein diluted in coating buffer (0.1 M sodium carbonate pH 9.2). Two dilutions of sera (1,000× and 5,000×) were made in PBS-BSA. Highly specific Horse Radish Peroxidase (HRP)-conjugated anti-human IgG secondary antibodies (Southern Biotech) were used according to the manufacturer's recommendations (dilution: 1,000×). Antigen-antibody complexes were quantified by measuring the conversion of the substrate (ABTS) to coloured product based on OD₄₀₅ₙₘ readings by automatic ELISA reader (TECAN SUNRISE).

### Preparation of total bacterial extracts. The K. pneumoniae strains Mich 61 (K-type 15; O-type 4) and 708 (K-type 80; O-type 12) and their capsule negative variants were grown overnight in Nutrient Broth (Difco 234000) at 37° C. Cells were lysed by repeated freeze-thaw cycles, following incubation on dry ice/ethanol-mixture until frozen for 1 min and thawing at 37° C. for 5 min. The lyses procedure was repeated 3 times, followed by sonication. After centrifugation at 4,000 rpm for 15 min at 4° C., the supernatant contains whole cell extracts and was collected. Pellets were discarded and protein concentration was measured with the Bradford assay using protein assay dye reagent concentrate (Bio-Rad Laboratories, Austria).

[0345] Purification of antibodies for genomic screening. Four to five sera per antibody pool were selected mainly based on their stronger reaction in ELISA against the capsule negative strain against the ones with capsule. Antibodies against E. coli DH5alpha proteins were removed by incubating the heat-inactivated sera with whole cell E. coli DH5alpha cells (transformed with pHIE11, grown under the same condition as used for bacterial surface display). Highly enriched preparations of IgGs from the pooled, depleted sera were generated by protein G affinity chromatography, according to the manufacturer's instructions (UltraLink Immobilized Protein G, Pierce). The efficiency of depletion and purification was checked by ELISA measurements.

### Results

[0346] The antibodies produced against K. pneumoniae by the human immune system and present in human sera are indicative of the in vivo expression of the antigenic proteins and of their immunogenicity. These molecules are essential for the identification of individual antigens in the approach as described in the present invention, which is based on the interaction of the specific anti-bacterial antibodies and the corresponding K. pneumoniae peptides or proteins. To gain access to relevant antibody repertoires, human sera were collected from patients with septicaemia and healthy exposed people.

[0347] 50 acute phase serum samples and 100 convalescent serum samples were collected from 100 donors and characterized for anti-K. pneumoniae antibodies together with 49 sera taken from healthy individuals by a series of immune assays. Primary characterization was done by ELISA using total bacterial lysates for K. pneumoniae strains Mich 61 and 708 and their respective capsule negative mutants. Antibody titers were measured and ELISA units calculated from serum dilutions in the linear range of response. Sera were ranked based on the differential reaction in ELISA against lysates prepared from strains with and without capsule, which was used for the selection of sera to be included in antibody-pools. The reactivity of the sera used for the generation of pools against bacterial lysates from K. pneumoniae is shown in FIGS. 1A and B.

[0348] Selected sera were included in 4 different IgG pools (4-5 sera in each pool) for antigen identification by bacterial surface display. IgG antibodies were purified from pooled sera by affinity chromatography and depleted of E. coli DH5alpha-reactive antibodies to avoid background in the bacterial surface display screens. The serum pools representing healthy individuals are ICKp18 (IC38, IC40, IC76 and IC86) and ICKp19 (IC88, IC89, IC92 and IC93) and from patients with septicaemia are PKp34 (P3536.2, P3548, P3560, P3582 and P3583) and PKp35 (P3495.2, P3533.2, P3567 and P3576).

### Example 3

### Generation of Highly Random, Frame-Selected, Small-Fragment, Genomic DNA Libraries of K. pneumoniae

### Experimental Procedures

[0349] Preparation of genomic DNA from K. pneumoniae strain MGH78578 (ATCC 700721). Cells from a 400 ml bacterial culture were harvested (5,000 rpm, 20 min, room temperature), washed with 80 ml 50 mM Tris pH 7.4 and re-suspended in 10 ml 50 mM Tris pH 7.4/25% Sucrose/50 mM EDTA. The suspension was transferred to a fresh glass tube and Lysozyme (final concentration: 1.5 mg/ml) and SDS (final conc.: 2%) were added. The tube was incubated on ice for cell lysis. Proteinase K (final concentration: 0.1 mg/ml) was added and incubated for 10 min at 37° C., followed by Phenol/Chloroform (1:1) extraction, which was performed several times. A final extraction step was performed with Chloroform/Isoamylalcohol (1:24) to remove Phenol traces. The sample was treated with RNase A (final concentration: 10 μg/ml) for 1 h at room temperature and Phenol/Chloroform and Chloroform/Isoamylalcohol extractions were performed as described above. DNA in the remaining supernatant was precipitated by addition of 1/10th of the starting volume of 3 M NaAc (pH 5.3) and 2.5× of the volume of 99.5% Ethanol. After 1 h incubation at −20° C., the mixture was centrifuged (20,000 rpm, 15 min) and the pellet washed with 70% Ethanol. Finally, the pellet was dissolved in TE-buffer.

### Preparation of Small Genomic DNA Fragments. Genomic DNA Fragments were Mechanically sheared into fragments ranging in size between 150 and 300 by using a cup-horn sonicator (Bandelin Sonoplus UV 2200 sonicator equipped with a BB5 cup horn, 10 sec. pulses at 100% power output) or into fragments of size between 50 and 70 by mild DNase I treatment (Novagen). It was observed that sonication yielded a much tighter fragment size distribution when breaking the DNA into fragments of the 150-300 by size range. However, despite extensive exposure of the DNA to ultrasonic wave-induced hydromechanical shearing force, subsequent decrease in fragment size could not be efficiently and reproducibly achieved. Therefore, fragments of 50 to 70 by in size were obtained by mild DNase I treatment using Novagen's shotgun cleavage kit. A 1:20 dilution of DNase I provided with the kit was prepared and the digestion was performed in the presence of MnCl₂ in a 60 μl volume at 20° C. for 5 min to ensure double-stranded cleavage by the enzyme. Reactions were stopped with 2 μl of 0.5 M EDTA and the fragmentation efficiency was evaluated on a 2% TAE-agarose gel. This treatment resulted in total fragmentation of genomic DNA into near 50-70 by fragments. Fragments were then blunt-ended twice using T4 DNA Polymerase in the presence of 100 μM each of dNTPs to ensure efficient flushing of the ends. Fragments were used immediately in ligation reactions or frozen at −20° C. for subsequent use.

[0350] Description of the vectors. The vector pMAL4.31 was constructed on a pASK-IBA backbone (Skerra, A., 1994) with the beta-lactamase (bla) gene exchanged with the Kanamycin resistance gene. In addition, the bla gene was cloned into the multiple cloning site. The sequence encoding mature beta-lactamase is preceded by the leader peptide sequence of ompA to allow efficient secretion across the cytoplasmic membrane. Furthermore a sequence encoding the first 12 amino acids (spacer sequence) of mature beta-lactamase follows the ompA leader peptide sequence to avoid fusion of sequences immediately after the leader peptidase cleavage site, since e.g. clusters of positive charged amino acids in this region would decrease or abolish translocation across the cytoplasmic membrane (Kajava, A. et al., 2000). A SmaI restriction site serves for library insertion. An upstream FseI site and a downstream NotI site, which were used for recovery of the selected fragment, flank the SmaI site. The three restriction sites are inserted after the sequence encoding the 12 amino acid spacer sequence in such a way that the bla gene is transcribed in the −1 reading frame resulting in a stop codon 15 by after the NotI site. A +1 by insertion restores the bla ORF so that beta-lactamase protein is produced with a consequent gain of Ampicillin resistance.

[0351] The vector pMAL9.1 was constructed by cloning the lamB gene into the multiple cloning site of pEH1 (Hashemzadeh-Bonehi, L. et al., 1998). Subsequently, a sequence was inserted in lamB after amino acid 154, containing the restriction sites FseI, SmaI and NotI. The reading frame for this insertion was constructed in such a way that transfer of frame-selected DNA fragments excised by digestion with FseI and NotI from plasmid pMAL4.31 yields a continuous reading frame of lamB and the respective insert.

[0352] The vector pHIE11 was constructed by cloning the JhuA gene into the multiple cloning site of pEH1. Thereafter, a sequence was inserted infhuA after amino acid 405, containing the restriction site FseI, XbaI and NotI. The reading frame for this insertion was chosen in a way that transfer of frame-selected DNA fragments excised by digestion with FseI and NotI from plasmid pMAL4.31 yields a continuous reading frame of fhuA and the respective insert.

[0353] Cloning and evaluation of the library for frame selection. Genomic K. pneumoniae (strain MGH78578). DNA fragments were ligated into the SmaI site of the vector pMAL4.31. Recombinant DNA was electroporated into DH10B electrocompetent E. coli cells (GIBCO BRL) and transformants plated on LB-agar supplemented with Kanamycin (50 μg/ml) and Ampicillin (50 μg/ml). Plates were incubated over night at 37° C. and colonies collected for large scale DNA extraction. A representative plate was stored and saved for collecting colonies for colony PCR analysis and large-scale sequencing. A simple colony PCR assay was used to initially determine the rough fragment size distribution as well as insertion efficiency. From sequencing data the precise fragment size was evaluated, junction intactness at the insertion site as well as the frame selection accuracy (3n+1 rule).

[0354] Cloning and evaluation of the library for bacterial surface display. Genomic DNA fragments were excised from the pMAL4.31 vector, containing the K. pneumoniae library with the restriction enzymes FseI and NotI. The entire population of fragments was then transferred into plasmids pMAL9.1 (LamB) or pHIE11 (FhuA), which have been digested with FseI and NotI. Using these two restriction enzymes, which recognise an 8 by GC rich sequence, the reading frame that was selected in the pMAL4.31 vector is maintained in each of the platform vectors. The plasmid library was then transformed into E. coli DH5alpha cells by electroporation. Cells were plated onto large LB-agar plates supplemented with 50 μg/ml Kanamycin and grown over night at 37° C. at a density yielding clearly visible single colonies. Cells were then scraped off the surface of these plates, washed with fresh LB medium and stored in aliquots for library screening at −80° C.

### Results

[0355] Libraries for frame selection. Two libraries were generated for K. pneumoniae strain MGH78578 in the pMAL4.31 vector with sizes of approximately 70 and 300 bp, respectively. For each library, ligation and subsequent transformation of approximately 1 μg of pMAL4.31 plasmid DNA and 50 ng of fragmented genomic K. pneumoniae DNA yielded 3×10⁵ to 2×10⁶ clones after frame selection. To assess the randomness of the libraries, approximately 500 to 600 randomly chosen clones of each library were sequenced. The representative bioinformatic analysis of two libraries (KPL50 and KPF300) showed that of clones corresponding to these libraries only very few were present more than once. Furthermore, it was shown for the KPL50 library that the average insert size was 77 bp, very close to the expected insert size (FIG. 2A). Regarding the KPF300 library, the average insert size was 187 by slightly shorter than the expected insert size (FIG. 2B).

[0356] Bacterial surface display libraries. The display of peptides on the surface of E. coli required the transfer of the inserts from the KPL50 and the KPF300 libraries from the frame selection vector pMAL4.31 to the display plasmids pMAL9.1 (LamB) or pHIE11 (FhuA). Genomic DNA fragments were excised by FseI and NotI restriction and ligation of 5 ng inserts with 0.1 μg plasmid DNA and subsequent transformation into DH5alpha cells resulted in 3×10⁵ to 2×10⁶ clones. The clones were scraped off the LB plates and frozen without further amplification.

### Example 4

### Identification of Highly Immunogenic Peptide Sequences from K. pneumoniae Using Bacterial Surface Displayed Genomic Libraries and Human Serum

### Experimental Procedures

[0357] MACS screening. Approximately 2.5×10⁸ cells from a given library were grown in 5 ml LB-medium supplemented with 50 μg/ml Kanamycin for 2 h at 37° C. Expression was induced by the addition of 1 mM IPTG for 30 min. Cells were washed twice with fresh LB medium and approximately 2×10⁷ cells re-suspended in 100 μl LB medium and transferred to an Eppendorf tube.

[0358] 10 to 20 μg of biotinylated, human IgGs purified from serum was added to the cells and the suspension incubated overnight at 4° C. with gentle shaking 900 μl of LB medium was added, the suspension mixed and subsequently centrifuged for 10 min at 6,000 rpm at 4° C. Cells were washed once with 1 ml LB and then re-suspended in 100 μl LB medium. 10 μl of MACS microbeads coupled to streptavidin (Miltenyi Biotech, Germany) were added and the incubation continued for 20 min at 4° C. Thereafter 900 μl of LB medium was added and the MACS microbead cell suspension was loaded onto the equilibrated MS column (Miltenyi Biotech, Germany), which was fixed to the magnet. The MS columns were equilibrated by washing once with 1 ml 70% EtOH and twice with 2 ml LB medium.

[0359] The column was then washed three times with 3 ml LB medium. After removal of the magnet, cells were eluted by washing with 2 ml LB medium. After washing the column with 3 ml LB medium, the 2 ml eluate was loaded a second time on the same column and the washing and elution process repeated. The loading, washing and elution process was performed a third time, resulting in a final eluate of 2 ml.

[0360] Cells selected after two rounds of selection were plated onto LB-agar plates supplemented with 50 μg/ml Kanamycin and grown over night at 37° C.

[0361] Evaluation of selected clones by sequencing and Western blot analysis. Randomly selected clones were grown overnight at 37° C. in 3 ml LB medium supplemented with 50 μg/ml Kanamycin to prepare plasmid DNA using standard procedures. Sequencing was performed at MWG (Germany) or Agowa (Germany).

[0362] For Western blot analysis approximately 10 to 20 μg of total cellular protein was separated by 10% SDS-PAGE and blotted onto HybondC membrane (Amersham Pharmacia Biotech, England). The LamB or FhuA fusion proteins were detected using human serum as the primary antibody at a dilution of approximately 1:3,000 to 1:5,000 and anti-human IgG antibodies coupled to HRP at a dilution of 1:5,000 as secondary antibodies. Detection was performed using the ECL detection kit (Amersham Pharmacia Biotech, England). Alternatively, rabbit anti-FhuA or rabbit anti-LamB polyclonal immune sera were used as primary antibodies in combination with the respective secondary antibodies coupled to HRP for the detection of the fusion proteins.

### Results

[0363] Screening of bacterial surface display libraries by magnetic activated cell sorting (MACS) using biotinylated Igs. The libraries KPL50 in pMAL9.1 and KPF300 in pHIE11 were screened with pools of biotinylated, human IgGs prepared from sera of uninfected healthy adults (IC38, IC40, IC76, IC86, IC88, IC89, IC92, and IC93) and patients with acute K. pneumoniae infections (septicaemia) (P3536.2, P3548, P3560, P3582, P3583, P3495.2, P3533.2, P3567 and P3576) (see Example 1: Preparation of Antibodies from Human Serum). the Selection Procedure was Performed as described under Experimental procedures. FIG. 3A shows a representative example of a screen with the KPL50 library and PKp34-IgGs. As can be seen from the colony count after the first selection cycle from MACS screening, the total number of cells recovered at the end is drastically reduced from 2.2×10⁷ cells to approximately 1.2×10⁴ cells, and the selection without antibodies showed a more pronounced reduction in cell numbers, showing that selection was dependent on K. pneumoniae specific antibodies (FIG. 3A). To evaluate the performance of the screen, 20 selected clones were picked randomly and subjected to immunoblot analysis with the screening PKp34-IgG pool (FIG. 3B). This analysis revealed that a majority of selected clones showed reactivity with antibodies present in the relevant serum whereas the control strain expressing FhuA without a K. pneumoniae specific insert did not react with the same serum. In general, the rate of reactivity was observed to lie within the range of 15 to 85%. Colony PCR analysis showed that all selected clones contained an insert in the expected size range (data not shown). Similar results were seen in screens with libraries from the other serum pools. As a second example, FIGS. 3C and D show the data obtained with the large insert KPF300 and the PKp35-IgG antibody pool. One round of MACS selection resulted in the enrichment of cells only in the presence, but not the absence of specific IgG (FIG. 3C), indicating that the selection was specific for the applied antibodies. The specific selection was then confirmed in the Western blot analysis of individual bacterial clones with the same PKp35-IgG antibody pool (FIG. 3D).

[0364] Subsequent sequencing of a larger number of randomly picked clones (600 to 800) from each screen led to the identification of the gene and the corresponding peptide or protein sequence that was specifically recognized by the human serum antibodies used for screening. The frequency with which a specific clone is selected reflects at least in part the abundance and/or affinity of the specific antibodies in the serum used for selection and recognizing the epitope presented by this clone. Table 1 summarizes the data obtained for all 8 performed screens. All clones that are presented in Table 1 have been verified by immunoblot analysis using whole cellular extracts from single clones to show the indicated reactivity with the pool of human serum used in the respective screen. As can be seen from Table 1, distinct regions of the identified ORF are identified as immunogenic, since variably sized fragments of the proteins are displayed on the surface by the platform proteins.

[0365] It is further worth noticing that many of the genes identified by the bacterial surface display screens encode proteins that are attached to the surface of the bacterium. This is in accordance with the expected role of surface attached proteins in virulence of K. pneumoniae .

### Example 5

### Gene Distribution Studies with Highly Immunogenic Proteins Identified from K. pneumoniae

### Experimental Procedures

[0366] Gene distribution of antigens by PCR. An ideal vaccine antigen would be an antigen that is present in all, or the vast majority of strains of the target organism the vaccine is directed to. In order to establish whether the genes encoding the identified K. pneumoniae antigens occur ubiquitously in the relevant strains, PCR was performed on a series of independent bacterial isolates with primers specific for the gene of interest. Oligonucleotide sequences as primers were designed for all identified ORFs yielding products of approximately 1,000 bp, if possible covering all identified immunogenic epitopes. Genomic DNA of all K. pneumoniae strains was prepared as described under Example 2. PCR was performed in a reaction volume of 25 μA using Taq polymerase (1 U), 200 nM dNTPs, 10 pMol of each oligonucleotide and the kit according to the manufacturer's instructions (Invitrogen, The Netherlands). As standard, 30 cycles (lx: 5 min. 95° C., 30×:30 sec. 95° C., 30 sec. 56° C., 30 sec. 72° C., 1×4 min. 72° C.) were performed, unless conditions had to be adapted for individual primer pairs.

### Results

[0367] Identified genes encoding immunogenic proteins were tested by PCR for their presence in 46 different K. pneumoniae strains (Table 3). All together 95 genes were analyzed. 40% (38/95) were detected in >90% of strains (>41/46), while 25% (24/95) were missing in >75% of the strains (<35/46) and therefore categorized as not sufficiently conserved. As an example, FIG. 4 shows the PCR reaction for the K. pneumoniae KPORF-54 antigen with all indicated 46 strains. As clearly visible, the gene is present in all strains analyzed. All results with the selected antigens are summarized in Table 3. Importantly, 80% of the identified antigens were well conserved among the strains of Klebsiella pneumoniae analyzed, at least in the presence and size of the gene-specific PCR products, therefore selected for further studies to evaluate their vaccine candidate potential.

### Example 6

### Validation of Peptides from K. pneumoniae by Peptide ELISA

[0368] Enzyme linked immunosorbent assay (ELISA). ELISA plates (Maxisorb, Millipore) were coated with 5-10 μg/ml total protein diluted in coating buffer (0.1 M sodium carbonate pH 9.2). Two dilutions of sera (400× and 2,000×) were made in PBS-BSA. Highly specific Horse Radish Peroxidase (HRP)-conjugated anti-human IgG secondary antibodies (Southern Biotech) were used according to the manufacturer's recommendations (dilution: 1,000×). Antigen-antibody complexes were quantified by measuring the conversion of the substrate (ABTS) to coloured product based on OD₄₀₅ₙₘ readings by automatic ELISA reader (TECAN SUNRISE). The measurements at 400× dilution were used for the calculation of the results as displayed in Table 4.

### Results

[0369] Immunogenicity in humans. The presence of specific antibodies in human sera was determined by peptide ELISA as summarized in Table 4. The human sera used for this analysis correspond to those that were included in the various serum pools applied for the identification of antigens by the bacterial surface display screens. Single or multiple peptides from individual antigens from K. pneumoniae MGH78578 were analyzed and many of these were shown to be immunogenic in humans. It is evident that some of the selected peptides are highly reactive with many or all of the investigated human sera (e.g. ORF-26.01 or ORF-81.01), while others showed intermediate or low reactivities. For those antigens for which the selected epitope encompassed more than 30 amino acids, multiple peptides were designed with an overlap of 5 to 6 amino acids. For some of the antigens, it was observed that these multiple peptides from the same antigen showed different reactivities, further delineating the immunogenic region of the respective antigen (e.g. KPORF-27 or KPORF-42). These experiments confirmed that many of the identified epitopes/proteins are highly immunogenic in humans, indicating that they are expressed by the pathogen during infection and capable of inducing a strong immune response.

### Example 7

### Surface Binding to K. pneumoniae of Immune Sera Obtained from Mice Immunized with Highly Immunogenic Proteins/Peptides from K. pneumoniae Displayed on the Surface of E. coli

[0370] Experimental procedures. FACS analysis. The K. pneumoniae strains A5054 and Friedländer 204 were inoculated from a glycerol stock into 5 ml THB medium and incubated over night at 37° C. The overnight culture was reinoculated by adding 200 μA into 10 ml fresh THB medium and incubated until an OD₆₀₀ of approximately 0.6 was reached (−5×10⁸ cells/ml). The bacteria were pelleted by centrifugation at 4,000 rpm for 5 min and washed twice with 2 ml HBSS. The final pellet was resuspended in HBSS with 0.5% BSA to give a cell density of 5×10⁶ cells/ml. To 100 μA bacteria, 5 μA immune serum was added and incubated for 45 min on ice. Bacteria were pelleted by centrifugation at 1,000 g for 4 min and washed once with 1 ml HBSS with 0.5% BSA and resuspended in 100 μA HBSS with 0.5% BSA. To the opsonised bacteria conjugated anti-mouse antibody were added at a dilution according to the manufacturer's recommendations (diluted in 100 μl). Secondary staining was performed on ice for 45 min in darkness. At the end of the incubation, the samples are centrifuged at 5,000 rpm for 3 min, washed with 1 ml HBSS and resuspended in 1 ml of HBSS-2% paraformaldehyde. Samples were vortexed, fixed overnight and analyzed by flow cytometry.

### Results

[0371] Surface binding to K. pneumoniae cells. The presence of antibodies recognising surface proteins on K. pneumoniae A5054 and Friedländer 204 were tested in FACS analysis. Of 103 antigens represented by different sera, 36 showed a significant shift in the FACS analysis compared to the buffer control as summarized in Table 5. These in vitro experiments indicate that in in vitro cultured K. pneumoniae cells these 36 antigens were expressed on the surface. As an example, FIG. 5 shows the FACS staining for the K. pneumoniae KPORF-28, KPORF-82 and KPORF-02 antigens which are representatives of the categories “+”, “++” and “+++”, respectively.

### Example 8

### Antigens Induce Protective Immune Responses Against Lethal Sepsis Induced by K. pneumoniae

### Experimental Procedures

[0372] Expression and purification of recombinant Klebsiella pneumoniae proteins. Cloning of genes/DNA fragments: The gene/DNA fragment of interest was amplified from genomic DNA of K. pneumoniae MGH78578 by PCR using gene specific primers. Apart from the gene specific part, the primers had restriction sites that aided in a directional cloning of the amplified PCR product. The gene annealing (specific) part of the primer ranged between 15-30 bases in length. The PCR products obtained were digested with the appropriate restriction enzymes and cloned into the pET28b (+) vector (Novagen) for His-tagged proteins. Once the recombinant plasmid was confirmed to contain the gene of interest, E. coli BL21-CodonPlus® cells (Stratagene) that served as expression host were transformed. The inserts were sequenced. The nucleotide sequences and the amino acid sequences of the gene specific fragments are listed under the respective sequence identification numbers (Seq ID Nos DNA, protein): KPORF-02.1:1, 188; KPORF-13.1:2, 189; KPORF-20.1:3, 190; KPORF-21.1:4, 191; KPORF-32.1:375, 376; KPORF-37.1:5, 192; KPORF-37.2:6, 193; KPORF-38.2:7, 194; KPORF-39.1:8, 195; KPORF-44.1:9, 196; KPORF-49.1:10, 197; KPORF-60.1:11, 198; KPORF-64.1:12, 199; KPORF-65.1:13, 200; KPORF-66.1:14, 201; KPORF-78.1:15, 202; KPORF-82.1:16, 203 (see also Table 16). Expression and purification of proteins. E. coli BL21-CodonPlus® cells harboring the recombinant plasmid of choice were grown into log phase in the required culture volume. Once an OD₆₀₀ₙₘ of 0.6 was reached the culture was induced with 0.5 mM IPTG for 3 hours at 37° C. The cells were harvested by centrifugation, lysed by a combination of the freeze-thaw method followed by disruption of cells with ‘Bug-buster®, (Novagen). The lysate was separated by centrifugation into soluble (supernatant) and insoluble (pellet) fractions. Depending on the location of the protein different purification strategies were applied. A) If the His-tagged protein was in the soluble fraction, protein purification was done by binding the supernatant to Ni-Sepharose beads (Ni-Sepharose™ 6 Fast Flow, GE Healthcare). Due to the presence of the hexa Histidine (6×HIS) at the C-terminus of the expressed protein, it bound to the Ni-Sepharose while the other contaminating proteins were washed from the column by wash buffer. The protein was eluted by 500 mM Imidazole in 20 mM NaH₂PO₄, 0.5 mM NaCl buffer at pH 7.4. The eluate was concentrated, assayed by Bradford for protein concentration and checked by SDS-PAGE and Western blot. B) If the protein was present in the insoluble fraction, the pellet was solubilized in suitable buffer containing 8 M Urea and applied onto the Ni-NTA column under denaturing conditions (in buffer containing 8 M Urea) using the same materials and procedure as mentioned above. Contaminating proteins were washed from the column by wash buffer without urea. Refolding of the His-tagged protein was performed while the protein was immobilized on the Ni-NTA matrix. After renaturation, proteins were eluted by the addition of 500 mM Imidazole. The eluate was dialyzed to remove traces of urea and concentrated if the volume was large, checked by SDS-PAGE and measured by the Bradford method.

### Animal Protection Studies

[0373] Animals: CD-1 female mice (6-8 weeks) were used.

[0374] Active immunization (subcutaneous route): 50 μg of recombinant proteins as listed in Table 16 adjuvanted with either Complete Freund's adjuvant (CFA), Alum, or IC31® were injected subcutaneously into CD-1 mice. On days 14 and 28, mice were boosted with the same amount of protein and adjuvant (except that Incomplete Freund's adjuvant (IFA) was used rather than CFA). Mice immunized with K. pneumoniae B5055 lysate served as a positive control, while mice immunized with PBS combined with adjuvant only served as a negative control. Antibody titres were measured at day 35 by ELISA using the respective recombinant proteins.

[0375] Passive immunization (intraperitoneal route): 150 μA of hyper-immune rabbit serum raised against individual K. pneumoniae recombinant protein antigens as listed in Table 16 was injected intraperitoneally (IP) into CD-1 mice, one to three hours prior to IP bacterial challenge. Antibody titres of the sera used for immunization were measured using the respective recombinant proteins.

Bacterial challenge: Freshly grown K. pneumoniae strain B5055 was used. In order to determine the viable cell numbers present in the bacterial inoculum, CFU were determined by plating dilutions of the inoculum onto blood agar plates. 10³ CFU were applied intraperitoneally. Protection conferred by immunization was measured using a bacteraemia/sepsis model in which survival rates were followed for 2 weeks post-challenge, and survival was expressed as a percentage of the total number of animals (10 mice/group).

### Results

### Active Immunization Experiments

[0376] As one of the main target indications for a preventive vaccine in humans is sepsis, an intraperitoneal challenge model for the evaluation of candidate antigens was employed and pre-selected K. pneumoniae antigens were tested for showing protection in this murine sepsis/lethality model. Protection has so far been observed for two distinct proteins in the intraperitoneal challenge model. As protection against K. pneumoniae challenge is mediated by antibodies, immunizations were performed using CFA/IFA as adjuvant in order to obtain the highest levels of antibodies. As can be seen in two independent experiments depicted on FIG. 6A and FIG. 6B/C, proteins KPORF-21.1 and KPORF-60.1 gave 100%, KPORF-38.2 and KPORF-39.1 90% and 60% protection, respectively. These antigens have not previously been shown to protect against K. pneumoniae infection.

[0377] Partial protection was observed for 9 ORFs; KPORF-02.1 (30%), KPORF-13.1 (40%), KPORF-20.1 (40%), KPORF-37.1 (20%), KPORF-37.2 (20%), KPORF-44.1 (30%), KPORF-64.1 (40%), KPORF-65.1 (50%), and KPORF-66.1 (40%) (FIGS. 6A, B, and C).

[0378] Recombinant proteins KPORF-13.1 and KPORF-37.1 were re-tested in the same model. In a single experiment, immunization with KPORF-13.1 gave protection of 70% and KPORF-37.1 gave protection of 50% against K. pneumoniae IP challenge (FIG. 6D).

[0379] In addition, two further recombinant proteins, KPORF-32.1 and KPORF-39.1-IB (protein is the same as KPORF-39.1 but was immunized as inclusion bodies), were tested in the same model and gave protection levels of 50% and 40% respectively (FIG. 6E). Immunization with the positive control, K. pneumoniae B5055 lysate, consistently gave 100% protection in all experiments.

[0380] The eight K. pneumoniae recombinant proteins which demonstrated protection in the previously described set of experiments when adjuvanted with CFA/IFA, were re-tested in active immunization experiments using either Alum or IC31® as adjuvant. In three independent experiments in which Alum was used as adjuvant, KPORF-13.1 and KPORF-21.1 gave 60% (FIG. 7A), 50%, and 40% protection respectively. KPORF-32.1 gave 80% (FIG. 7A), 75%, and 70% protection respectively. In three independent experiments, KPORF-39.1-IB gave 100% protection (FIG. 7B, single experiment shown). KPORF-37.1 gave 40% protection (FIG. 7A), KPORF-38.2 gave 60% (FIG. 7B), and KPORF-65.1 gave 50% (FIG. 7B) protection consistently in three independent experiments (single experiments shown). KPORF-60.1 gave 67% (FIG. 7B), 58%, and 50% protection in three independent experiments.

[0381] In three independent experiments in which IC31® was used as adjuvant, protein KPORF-13.1 gave 40% (FIG. 8A), 35%, and 30% protection respectively. KPORF-21.1 gave 60% (FIG. 8B), 55%, and 50% protection. Immunization with KPORF-32.1 resulted in only 22% (FIG. 8B), 16%, and 10% survival. KPORF-37.1 gave 30% (FIG. 8B, single experiment shown) protection in three independent experiments. KPORF-38.2 gave 60% (FIG. 8A), 55%, and 50% protection in three independent experiments. KPORF-39.1-IB gave 50% (FIG. 8A), 40%, and 30% protection respectively. KPORF-60.1 gave 63% (FIG. 8A), 59%, and 56% protection respectively. Immunization with KPORF-65.1 resulted in 50% (FIG. 8B), 35%, and 20% survival respectively.

### Passive Immunization Experiments

[0382] Hyper-immune rabbit sera were raised individually against K. pneumoniae B5055 lysate, PBS, and the eight individual K. pneumoniae recombinant proteins demonstrating protection in active immunization experiments; KPORF-13.1, KPORF-21.1, KPORF-32.1, KPORF-37.1, KPORF-38.2, KPORF-39.1, KPORF-60.1, and KPORF-65.1 In single experiments, passive immunization of mice with KPORF-60.1 sera gave 60% protection (FIG. 9A) and immunization with KPORF-37.1 sera gave 40% protection against K. pneumoniae challenge (FIG. 9B). 100% protection was observed in all mice immunized with K. pneumoniae B5055 lysate sera. No survival was observed in mice immunized with PBS sera (FIGS. 9A & B). 20% survival was observed in mice immunized with KPORF-32.1 sera (FIG. 9B). No protection was observed in mice immunized with sera raised against the other five proteins KPORF-13.1, KPORF-21.1, KPORF-38.2, KPORF-60.1 (FIG. 9A), KPORF-65.1 (FIG. 9B).

[0383] These antigens have not previously been shown to protect against K. pneumoniae infection.

### Example 9

### Gene conservation of Klebsiella Antigens

[0384] Preparation of Klebsiella sp. Genomic DNA

[0385] 7 ml DIFCO0001 medium were inoculated with the respective strain of Klebsiella sp. from a frozen stab and grown without shaking at 37° C. overnight. 2 ml of the culture were then harvested by centrifuging at 13,000 rpm in a Biofuge fresco (Heraeus) for 5 min and the supernatant was removed. DNA was isolated from the bacterial cell pellets following the protocol of Wizard® Genomic DNA Purification Kit (Promega). The DNA pellets were finally dried on air and dissolved in 70 μl ddH₂O.

[0386] PCR amplification of Klebsiella sp. antigens PCR was performed on a series of independent Klebsiella sp. isolates (Table 6) with primers specific for the gene of interest. Oligonucleotide sequences as primers were designed for eight antigen candidates using the public program Primer3 (http://frodo.wi.mit.edu/cgi-bin/primer3/primer3_www slow.cgi) or picked manually. Oligonucleotide sequences as primers for PCR were designed for the selected antigens in order to be able to amplify the full gene. Genomic DNA of all Klebsiella sp. strains was prepared as described above. PCR was performed in a reaction volume of 30 μl using Taq polymerase (1 U), 200 nM dNTPs, 10 pMol of each oligonucleotide, approx. 10 to 20 ng DNA and a kit according to the manufacturers instructions (Invitrogen, The Netherlands). As standard, 30 cycles (1×:5 min. 95° C., 30×:30 sec. 95° C., 30 sec. 52° C., 90 sec. 72° C., 1×:4 min. 72° C.) were performed, unless conditions had to be adapted for individual primer pairs. The PCR amplification was performed in a Biometra T3 Thermocycler. All negative PCR reactions in the first amplification round were repeated by applying optimized conditions. The DNA fragments were subsequently visualized by electrophoresis on a 1% agarose gel and stained with EtBr.

Sequence Analyses of Klebsiella sp. Genes

[0387] In order to determine the sequence of an antigen from diverse Klebsiella sp. strains, PCR was performed with primers specific for the gene of interest, as described above. Klebsiella sp. strains used for these analyses are shown in Table 6. Sequencing was performed with dedicated primers using the PCR products as templates. The sequences of the oligonucleotides are listed in Table 7. Genomic DNA of all Klebsiella sp. strains was prepared as described above. PCR was performed in a reaction volume of 30 μA, as described above, unless conditions had to be adapted for individual primer pairs. PCR samples were sequenced with the oligonucleotides as listed in Table 7. Sequencing was performed at Agowa (Berlin, Germany).

### Results

[0388] The Selected Klebsiella pneumoniae Antigens are Highly Conserved

[0389] The PCR and sequencing of the 8 selected genes were performed as described under Methods. Table 6 shows the strains used for sequencing, while Table 7 lists the oligonucleotides employed for the PCR and sequencing analyses. Seven of the eight genes display a level of sequence identity larger than app. 93% in all analyzed strains, with the exception of KPORF-21 that is at least to a level of 83% identical. The detailed analyses of the individual genes are described separately below.

### Sequence Analyses of KPORF-13

[0390] Sequences were obtained from 39 strains. The level of amino acid sequence identity ranged from 95.8% to 100% as compared to the reference sequence of KPORF-13 from Klebsiella pneumoniae MGH78578. Table 8 lists all 43 amino acid positions which showed a distinct amino acid as compared to KPORF-13 from Klebsiella pneumoniae MGH78578.

### Sequence Analyses of KPORF-21

[0391] Sequences were obtained from 49 strains. The level of amino acid sequence identity ranged from 83.3% to 100% as compared to the sequence of KPORF-21 from Klebsiella pneumoniae MGH78578. Table 9 lists all 43 amino acid positions which showed a distinct amino acid as compared to KPORF-21 from Klebsiella pneumoniae MGH78578.

### Sequence Analyses of KPORF-32

[0392] Sequences were obtained from 40 strains. The level of amino acid sequence identity ranged from 92.7% to 99.5% as compared to the sequence of KPORF-32 from Klebsiella pneumoniae MGH78578. Table 10 lists all 69 amino acid positions which showed a distinct amino acid as compared to KPORF-32 from Klebsiella pneumoniae MGH78578.

### Sequence Analyses of KPORF-37

[0393] Sequences were obtained from 39 strains. The level of amino acid sequence identity ranged from 99.4% to 100% as compared to the sequence of KPORF-37 from Klebsiella pneumoniae MGH78578. Table 11 lists all 20 amino acid positions which showed a distinct amino acid as compared to KPORF-37 from Klebsiella pneumoniae MGH78578.

### Sequence Analyses of KPORF-38

[0394] Partial sequences were obtained from 38 strains, as the nucleotide sequence encoding the very C-terminus was not successfully amplified so far (Table 12). The level of amino acid sequence identity ranged from 98.2% to 99.9% as compared to the sequence of KPORF-38 from Klebsiella pneumoniae MGH78578. Except for partial KPORF-38 sequences obtained from Klebsiella sp. strain i252/94 and Klebsiella sp. strain 708, all analyzed sequences comprise the corresponding amino acid sequence encompassing the KPORF-38.2 (amino acid range 582-1099) fragment of KPORF-38 from Klebsiella pneumoniae MGH78578.

### Sequence Analyses of KPORF-39

[0395] Sequences were obtained from 50 strains. The level of amino acid sequence identity ranged from 93.1% to 100% as compared to the sequence of KPORF-39 from Klebsiella pneumoniae MGH78578. Table 13 lists all 29 amino acid positions which showed a distinct amino acid as compared to KPORF-39 from Klebsiella pneumoniae MGH78578.

### Sequence Analyses of KPORF-60

[0396] Sequences were obtained from 50 strains. The level of amino acid sequence identity ranged from 94.4% to 100% as compared to the sequence of KPORF-60 from Klebsiella pneumoniae MGH78578. Table 14 lists all 14 amino acid positions which showed a distinct amino acid as compared to KPORF-60 from Klebsiella pneumoniae MGH78578.

### Sequence Analyses of KPORF-65

[0397] Sequences were obtained from 48 strains. The level of amino acid sequence identity ranged from 98.3% to 100% as compared to the sequence of KPORF-65 from Klebsiella pneumoniae MGH78578. Table 15 lists all 27 amino acid positions which showed a distinct amino acid as compared to KPORF-65 from Klebsiella pneumoniae MGH78578.

### REFERENCES

[0398] The following references which have been recited in the present specification in a truncated version are incorporated herein by reference in their entirety.
[0399] Altschul, S., et al. (1990). Journal of Molecular Biology 215: 403-410.
[0400] Amit, A. G., et al. (1986). Science 233: 747-753.
[0401] Bennett, D., et al. (1995). J Mol Recognit 8: 52-58.
[0402] Carter, P., et al. (1985). Nucl. Acids Res. 13: 4431-4443.
[0403] Clackson, T., et al. (1991). Nature 352: 624-628.
[0404] Cohen, J. (1993). Science 259: 1691-1692.
[0405] Cryz, S. J., et al. (1986). Vaccine 4: 15-20.
[0406] Current Protocols in Molecular Biology, John Wiley and Sons, Inc. (1987).
[0407] Devereux, J., et al. (1984). Nucleic acids research 12: 387-395.
[0408] Doherty, E., et al. (2001). Annu Rev Biophys Biomol Struct 30: 457-475.
[0409] Eisenbraun, M., et al. (1993). DNA Cell Biol 12: 791-797.
[0410] Etz, H., et al. (2001). J Bacteriol 183: 6924-6935.
[0411] Ganz, T. (1999). Science 286: 420-421.
[0412] Georgiou, G. (1997). Nature Biotechnology 15: 29-34.
[0413] Haeggman, S., et al. (1997). Antimicrob Agents Chemother. 41: 2705-2709.
[0414] Hashemzadeh-Bonehi, L., et al. (1998). Mol Microbiol 30: 676-678.
[0415] Heinje, von G. (1987). Sequence Analysis in Molecular Biology, Academic Press.
[0416] Hemmer, B., et al. (1999). Nat Med 5: 1375-1382.
[0417] Hornef, M., et al. (2002). Nat Immunol 3: 1033-1040.
[0418] Huse, W. D., et al. (1988). Science 246: 1275-1281.
[0419] Ishibashi, S., et al. (1993). J. Clin. Invest. 92: 883-893.
[0420] Johanson, K., et al. (1995). J Biol Chem 270: 9459-9471.
[0421] Jones, P., et al. (1986). Nature 321: 522-525.
[0422] Kajava, A., et al. (2000). J Bacteriol 182: 2163-2169.
[0423] Kay, M., et al. (1994). Proc. Natl. Acad. Sci. USA 91: 2353-2357.
[0424] Kohler, G., et al. (1975). Nature 256: 495-497.
[0425] Kolaskar, A., et al. (1990). FEBS Lett 276: 172-174.
[0426] Kurupati, P., et al. (2006). Proteomics 6: 836-844.
[0427] Lewin, A., et al. (2001). Trends Mol Med 7: 221-228.
[0428] Marks, J., et al. (1992). Biotechnology (N Y) 10: 779-783.
[0429] McCafferty, J., et al. (1990). Nature 348: 552-554.
[0430] Nagy, E., et al. (2003). Identification of the “antigenome”—a novel tool for design and development of subunit vaccines against bacterial pathogens. In Genomics, Proteomics and Vaccines (G. Grandi, ed), John Wiley & Sons Ltd., UK.
[0431] Okano, H., et al. (1991). J Neurochem 56: 560-567.
[0432] Oligodeoxynucleotides as Antisense Inhibitors of Gene Expression; CRC Press, Boca Raton, Fla. (1988).
[0433] Ørskov, I. (1984). Genus Klebsiella, p 461-465. In N. R. Krieg and J. G. Holt (ed.), Bergey's manual of systematic bacteriology, vol. 1. The Williams & Wilkins Co., Baltimore, Md.
[0434] Parchuri, S., et al. (2005). Heart Lung. 34:360-363.
[0435] Podschun, R., et al. (1998). Clinical microbiology review. vol. 11:4:589-603.
[0436] Queen, C., et al. (1989). Proc. Natl. Acad. Sci. USA 86: 10029-10033.
[0437] Rammensee, H., et al. (1999). Immunogenetics 50: 213-219.
[0438] Remington's Pharmaceutical Sciences, by E. W. Martin, Mack Publishing Co., Easton, Pa., 15th Edition (1975).
[0439] Riechmann, L., et al. (1988). Nature 332: 323-327.
[0440] Seeger, C., et al. (1984). Proc Natl Acad Sci USA 81: 5849-5852.
[0441] Skerra, A. (1994). Gene 151: 131-135.
[0442] Stamm, W. E, et al. (1981). Comparison of endemic and epidemic nonsocomial infection. Nosocomial infection. Yorke Medical Books, Atlanta. Ga. p. 9-13.
[0443] Tang, D., et al. (1992). Nature 356: 152-154.
[0444] Tempest, P., et al. (1991). Biotechnology (N Y) 9: 266-271.
[0445] Tourdot, S., et al. (2000). Eur J Immunol 30: 3411-3421.
[0446] Ueda, Y., et al. (2005). Antimicrob Agents Chemother. 49: 4185-4196.
[0447] Wells et al. (1986). Philos. Trans. R. Soc. London Ser.A 317: 415.
[0448] Wells, J. A., et al. (1985). Gene 34: 315-323.
[0449] Wu, L. T., et al. (2005). Clin Microbiol Infect. 11: 893-897.
[0450] Yadav, V., et al. (2005). Folia Microbiol (Praha) 50: 83-86.
[0451] Zoller, M. J., et al. (1987). Nucl. Acids Res. 10: 6487-6500.

[0452] The features of the present invention disclosed in the specification, the claims and/or the drawings may both separately and in any combination thereof be material for realizing the invention in various forms thereof.

The application's sequence listing, which the Patent Office published only in electronic form, follows.

SEQUENCE LISTING (765 sequences)

SEQ ID NO: 1 - DNA, 387 bp, Klebsiella pneumoniae
ttttcatacattatgctgggaacgaacgatctgccacgcgccatcaagttctatgacccgttaatggcgctgctgggacacgtcaaagccggccgtaacgaacagggggcgtcctggggcaccttcaacggcaatcacacctgcgggctgtgcgtgggtgttccttttgaccagcagcctgccggggtgggtaatggaacgatggtggcgcttaacgcccgctccgtcgcacatattgcggaactgcatgccctcgccctgcaactcggcggacgtgacgaaggcggtcccggtcaccggccgcagtatggcgacggttttcacagcgcctacgtccgcgatcccgacggcaataagctggcgtttgtttactatgcgtcggcagat

SEQ ID NO: 2 - DNA, 993 bp, Klebsiella pneumoniae
gctgataaaatggtcatcgcccaccgcggcgccagcgggtatctgccggaacataccctgccggcgaaagcgatggcttacgctcagggggcggattaccttgagcaagacctggtgatgaccaaagacgaccggctggtggtgttacacgaccactatctcgatcgggtgactgacgttgcgcagcgtttcccgcagcgggcgcgtaaagatggccgtttctacgccatcgactttaccctggacgagattaagtcgctgaagttcaccgaaggttttgagccgaaaaatggtaagaacgtgcaaacctatcccgggcgattcccgatgggcaaatccgatttccgtattcatacctttgaagaggagattgagtttgtccaggggctgaaccattcaaccggcaaaaacatcggtatctacccggaaatcaaagcgccgtggttccaccaccaggaaggcaaagatattgccgccagcacattgaaggtgctgaaggaatatggctataccagcaagcaggataaggtttatctgcagtgctttgacgccaacgagctcaaacgcattaaaaatgagctggagccgaagatggggatggatctcaatctggtgcagctcatcgcctataccgactggaatgaaacccagcagaaacaggccgatggtaagtgggtgaactacagctatgactggatgttcaagccaggggcgatggcgcagattgcgcagtacgcggacggtatcggcccggattaccatatgctggtagcggaaggctcgaagccgggggcggtgaagctgacggcgatggtgaaagaggcgcatgccagccatctgcaggtgcatccgtacaccgtgcgcgcggatcagttgccggagtacgcgactaacgttaatcagctctatgacgtgctgtataaccaggcgggcgtcgacggcttatttaccgatttcccggataaagcggtgcagttcctggacgcgaaacgc

SEQ ID NO: 3 - DNA, 537 bp, Klebsiella pneumoniae
ctattaatgcaacgaatcacaaagctggataacgacttaacctgtaagggaatgctgatgaaactctggaataaaacactactcgcttccgccctgtgcctgaccctgtttggctgcgacgatgcgtcgaaagttgataacaaactggataaggctaaagataatgcggagcagatgaaggatgccgcggcggataaagcgcaggcaattaaacaggatgcggataaacaaatcgatacgctgaaaagccaggctgacgccgaggccgatcgcctgaaggatcaggccagcgccatcaaggccgaggcggacaagaaggcggacgccatcgcccagcaggcgaaagcccaggccgatgcggtgaagcagaacgcaaagcaggaaagtgaccgcatagtcaaagaggcgggtcagatcaaagacaacgccatcggtgacgccaatcagctctcggctgaagcggcgagcaaaaccaaagccatccaggacagtatcgcgaaggataaacagaacgccgcgccgcctgccgcacagcag

SEQ ID NO: 4 - DNA, 504 bp, Klebsiella pneumoniae
gtgcctgtgactgaaccttcatcacgccgctccggctacgcccgcctgctggaccgtgctatccgcattctggcgatgcgcgaccacagcgagcaggagctgcgacgcaagctggtcgctccggtgatgagcaaaaacggtcctgaggcgctggacgtcacccccgacgagctggagcaggttgtcgcctggtgtatcgaaaaccgctaccttgacgacaaccgcttcgtcggccagttcatcgccagccggagccgcaaaggctatggtccggcgcgcattcgccaggagctcagccagaaaggcattgcgcgccaggtcgttgaccaggcgatgcgcgaatgcgatatcgactgggtgagccttgccagggagcaggcacagcgtaaatacggcgaaccgttaccttccgcctttactgaaaaagtgaaagttcagcgattcctgctttaccgcggctacctgatggaagatatccaggaaatctggcgaaattttgcagat

SEQ ID NO: 5 - DNA, 1257 bp, Klebsiella pneumoniae
agcaaagtcagaatcgctattatcggtaacggcatggttggccatcgctttatcgaagagcttctcgataaggcgcctgccggacagttcgacattaccgtgttctgtgaagaaccgcgtatcgcctacgaccgcgtccacctgtcgtcttatttctcccatcacactgcggaagaactgtcgctggtacgcgaaggtttctatgagaaacacggcgtcaaggtgctggtcggcgaacgggcgatcaccatcaaccgccaggagaaagtgatccactccagcgccgggcgtaccgtgttctacgacaagctgattatggcgaccggttcatacccgtggatcccgccgattaaaggcgcggaaacccaggattgcttcgtctatcgcactattgaagatcttaacgccatcgaatcctgcgcccgccgcagcaaacgcggcgcggtagtcggcggcggcctgctcggcctggaagcggccggagcgttgaaaaacctcggcgtggaaacccatgttatcgaattcgcgccgatgctgatggccgaacagctcgaccagatgggcggcgagcagttgcggcgcaaaatcgaaagcatgggcgtgaaagttcacaccagcaaaaacaccaaagagattgttcagcagggcaccgaggcgcgcaaaaccatgcacttcgccgacggtagcgagctgcaggtcgatttcatcgtcttctcaaccgggatccgcccgcgcgataagctggccacccagtgcgggctggcggtcgcccagcgcggcggcatcatggtcaacgatagctgccagacctccgatccggatatctatgccatcggggaatgcgccagctggaacaaccgcgtctacggtctggtcgcccccggctataaaatggcccaggtggccgtcgaccatctcctcggcagtgaaaatagcttcaccggcgccgacctcagcgccaagctgaagctgttgggtgtggacgtgggcgggatcggcgatgcccacggccgcacgccgggcgcccgtagctacgtctatctcgacgaaagcaaagaagtttataagcgcctgatcgtcagcgccgacaacaaaacgctgctcggcgcggtactggtcggcgacaccagcgactacggcaatctgctgcagctggtgctcaacgccatcgagctgccggaaaacccggattcgctgatcctcccggcccacgccggcagcggcaagccatcgatcggcgtggataaactgccggac

SEQ ID NO: 6 - DNA, 1302 bp, Klebsiella pneumoniae
ggcgtggataaactgccggacagcgcgcagatctgctcctgctttgacgtcagcaaaggcgacctgatcgccgctatcaacaaaggctgccacaccgtggcggcgctgaaagcggaaaccaaagccgggaccggctgcgggggctgtattccgctggtcactcaggtgctcaacgccgagctggcgaaacagggcattgaggtcaacaacaatctgtgcgaacacttcgcttactcccgtcaggagctgttccacctgatccgcgtggaaggcatcaaaaccttcgacgagctgctggaaaaacacggtcagggctacggctgtgaagtctgtaagccgaccgtcggttccctgctggcctcctgctggaatgagtacatcctcaagccgcagcacacgccgctgcaggacagcaacgacaacttcctcgccaacattcagaaagatggtacctattcggtgatcccgcgctcagctggcggcgaaatcacgccggaagggctggtcgccgtgggccgtatcgcgcgtgaattcaatctgtacaccaaaatcaccggctctcagcgcatcggcctgtttggcgcgcagaaagacgacctgccggagatctggcggcagctgattgaagcgggattcgaaaccggccacgcctacgccaaagcgctgcgaatggcgaaaacctgcgtcggcagcacctggtgccgctacggcgttggcgacagcgtcggcttcggcgtggaactggaaaaccgctacaaaggcatccgcaccccgcacaaaatgaagttcggcgtctccggctgcacccgcgaatgtgccgaggctcagggcaaagacgtcgggatcatcgccaccgagaaaggctggaacctgtacgtttgcggtaacggcgggatgaaaccgcgccacgccgatctactggccgcggacctcgatcgcgagacgctcatcaaatatctcgaccgctttatgatgttctacatccgcaccgccgataagctgacccgcactgccccgtggctggacaatatggaaggcggtatcgactatctgcgcagcgtcatcatcgatgacaagctcggtctgaacgaccatctggaagaagaactggctcgcctgcgcgccgccttcgcctgcgagtggaccgagaccgtcaacaacccggcggcgcagacccgcttcaaacactttatcaacagcgaccagcgcgacccgaacgttcaggtggtgccggaacgtgaccagcaccgcccggccacgccgtatgagcgtatcccggttactctggtggaggaaaaagca

SEQ ID NO: 7 - DNA, 1554 bp, Klebsiella pneumoniae
gtgaccacctcaagccagtggcaggatagccattcgccgctgcaggtggtgttgcaggccagcctgctggaatccggcggtcgcccggtgacccgtacggttaagcagccgatctggcccgccgaggcgctgccggggatccgcccgcaatttacgctgaaggacgtttacgattaccgcaccgataccaccgtcaaacagccggtggtggatgaaaacagtaacgccgcgtttgatatcgtctatgccgacgtcaaaggcgagaaaaaagcgatctccggtctccaggtgcggctgatccgcgagcggcgcgactactactggaactggtccgacagcgaaggttggcagtcgcagttcgatcaaaaagatctgcaggagggcgaggagtcgctggacctgcaggccggccagatcggcaaagtgagcttcccggtggagtggggatcctatcgcctggaggtgaaaggaccggacgacgtggtcagcagcgtgcgcttctgggcgggctacagctggcaggataacagcgaaggcgccggcgcggcgcgtcctgaccgggtcaccatgaagctggataaaccgagctataaaccgggcgacaccatcaggctgcacatcgccgccccggcggcgggtaaaggctacgcaatggtggaatccagcgaagggccgctgtggtggcaggaaattgacgtcccggcggaggggatggacctgtcgatcccggtggataaaacctggaatcgccacgacctctacctcagcacgctggtggttcgtcccggcgataaatcgcgctcggcaacgccgaaacgcgcggtgggcctgctgcatctgccgctgggcgatgaaaaccgtcgcctgacgctggcgctggaggccccggacaaaatgcgccccaaccagccgctgacggtgaaagtgaaagccagcgtcaaagagggcgaggcgccgaaacaggtcaatgtcctgctctcggcggtggatagcggggtactgaatatcaccgattacgctaccccggatccgtggaacgccttctttggccagaagcgttacggcgcagatatctatgacatctacggccaggtgatcgaagggcaggggcgggtggccagcctgcgcttcggcggcgatggcgacgagttaaaacgcggcggcaaaccgccggtcaaccacgtgacgatcgtcgcccagcaggcgcagccggtggtattgaacgatcagggcgaaggcacggtgacgttacccattggcgattttaacggcgagctgcgggtgatggcccaggcgtggacggcggatgacttcggcagcagcgaagataaagtggtggtggccgccccggtcatcgccgaactgaacaccccgcgcttcctcgccagcggcgataccacacggctggcgctggatctcagcaatctgaccgataaaccgcaaaccctgcaggttcatcttaccgccagcgggctggtgaccttgaccgagggtcaactgccgccggtgcaactggcgccgggggcgcgcagcacgctgtttataccagtgagc

SEQ ID NO: 8 - DNA, 735 bp, Klebsiella pneumoniae
gtggatggatggcagcgcgcctttgtcctgcatagccgtccgtggagcgaaaccagcctgatgctggacgtcttcacggaagaatccggtcgtgtgcgcctggttgccaagggcgcacgctccaaacgctctaatctcaaaggcgctttacagccctttacccccttgctggttcgcttcggcggtcgcggcgaagtcaaaaccctgcgcagcgcggaagccgtttcgctggcgctgccgctcagcggcatcaccctctacagcggtctctacgttaacgagcttatctcccgcgtgctggagcacgaaacacgcttctccgaactctttttcgactacctgcactgcattcaggcgctcgccggggccagcggctcgccggagcccgcgctgcggcgttttgagctggcgctgctcgggcacctggggtatggcgtggattttctccactgcgccgggagcggcgagccggtagacgacaccatgacctaccgctatcgtgaagaaaaaggctttattgccagcctggtgattgataacaacacgtttaccgggcaccatttgaaagcattggcgagtcgcgagtttcctgatgttgatacgctgcgcgccgcgaagcgctttacccgtatcgccctgaagccctatctcggcggcaaaccgctcaagagccgggagttgtttcgccagtttatgcccgcgcgaaaggcgcgagccgataatacgaataatgat

SEQ ID NO: 9 - DNA, 2040 bp, Klebsiella pneumoniae
gtcaagtcgttaagggcatggccttcaacagtccgaactggagtcaaaatgtcctcacgtaaagagcttgctaacgctattcgtgcgctgagcatggacgctgtacagaaagccaaatccggccacccgggggccccgatgggtatggctgacattgccgaagtgctgtggcgtgatttcctgaaccataacccgaacaatccggcctgggctgaccgtgaccgttttgtgttgtcaaatggccatggttcgatgctgatttacagcctgctgcacctcactggctacgatctgccgattgaagagctgaaaaacttccgccagctgcactccaaaaccccgggtcacccggaagtcggctacaccgcaggcgtggaaaccaccaccggtccgctgggccagggtatcgctaacgcggtcgggatggctatcgccgagaaaaccctggcggcgcagttcaaccgtccgggacacgatatcgtcgaccactacacctacgccttcatgggcgacggctgcatgatggaaggcatttctcacgaagtgtgctccctggccggtaccctgaaactgggtaaactggtggcgttctatgatgacaacggcatctccatcgacggccacgttgaaggctggttcaccgacgacaccgccaaacgctttgaagcctacggctggcacgtggtgcgcggcgtggacggtcacgacgctgacgccatcaaacgcgcggtagaagaagcgcgggcggtcaccgacaaaccgtccctgctgatgtgtaaaaccatcatcggtttcggttcgccgaacaaagccggtacccacgactcccacggcgcgccgctgggcgacgccgaaatcgccctgacccgcgaagcgctgggctggaaacacgcgccgtttgacatcccgtctgacatctatgcccagtgggatgccaaagaagccggccaggcgaaagaagccgcatggaacgagaagtttgcggcttacgccaaagccttcccgcaggaagcagccgaattcacccgccgtatgaaaggcgagatgccgtctgacttcgacgcgaaagctaacgagttcatcgcgaagctgcaggccaacccggcgaaaatcgccagccgtaaagcctcgcagaacgccatcgaagccttcggcccgctgctgccggaattcctcggcggctccgcagatctcgcgccgtccaacctgaccctgtggtccggctctaagccgatcaacgaagacgctgccgggaactacatccactacggcgtgcgcgagttcggtatgaccgctatcgccaacggtatcgcgctgcacggcggcttcctgccgtacacctccaccttcctgatgttcgtggaatacgcgcgtaacgcggtacgtatggccgcgctgatgaaacagcgtcaggtgatggtctacacccacgactcgatcggtctgggcgaagacggcccgactcaccagccggtagagcaggtggcttccctgcgcgtgaccccgaacatgtccacctggcgtccgtgtgaccaggttgaatccgcgattgcgtggaaatatggcgtggagcgtcaggacggcccgaccgcgctgatcctctcccgtcagaacctggcgcagcaggagcgtaccgcagagcagctggcgaacgtggcccgcggcggttatgtgctgaaagagtgcaccggctcgcagccggagctgatcttcatcgccaccggttcagaagtggagctggcggttgccgcatgggacaaactgactgccgaaggcgtgaaggcgcgcgtggtttccatgccgtccaccgacgcgttcgacaagcaggatgcggcttatcgcgaatccgtactgccgaaagccgtgaccgcgcgcgttgccgtggaagcgggtatcgctgactactggttcaaatacgttggcctgaacggcgctatcgttggcatgaccaccttcggtgagtctgcgccggctgagcagctgttcgaggagttcggcttcaccgttgataacgtggtcgctaaagcgaaagcgctgctg

SEQ ID NO: 10 - DNA, 918 bp, Klebsiella pneumoniae
gaagttaaaatcgcccttgtggcgaaatcgctgggaaatggcttcttcgaagccgccaacgttggcgcccaacaggcagccaaggagttaggtgatgtcaaagtgatctacaccggcccgaccactaccaccgccgaggcgcagatcgacgtgctgaacgggttgatcgcccagggggtggatgcgatcgccatttccgccaacgatccggacgcggtggtgccggtgctgaaaaaagcgatgcagcgcggcatcaaggtggtctcatgggactccggcgtggcgccggcaggccgtcagatccatcttaacccctcaaataacgccttaattggcgaaaccaacgtcaagcttgccgccgatgcgctgcaggcgctgaacgttgagaaaggcgaggtggccgtgttaagcgccaccccaacctccacgaaccagaacatctggattgaggagatgaaaaaggtgctaccgcagtatccgtcggtgcagctggtcaccgtcgcctacggtgacgatctgtcggataaaagctaccgcgaagcggtgggtctgctgaaatcatatccggacctgaaagtcattgtctcgccgtcgtcggtggggattgttgccgccgcgcaggcggtgaaggaccagggcaaaatcggcaaagtgtatgtcaccgggctggggctgccgtcggaaatggccggcgcgatcaagtccggcgccagcaaaagcttcgccatctggaacccgattgacctgggctacgccgccacctatctggccgacgatttagtcaaaggcacggcgaccaaaaccgaagccagtatgggcaagctgggcaaagtgaatctggacgccgaggggaatggcgcgatggccaagccgtttgtctacgatgcgagcaacatcgataagttctcgaaaattttc

SEQ ID NO: 11 - DNA, 678 bp, Klebsiella pneumoniae
gctaataagaccctggttgtcgccaccgatacggcgttcgtcccgttcgaatttaagcaaggcgataagtatgtgggttttgacgttgacctgtgggcggctatcgccaaagagctgaagctcgactacaccctgaagccaatggacttcagcggcattatcccggcgctgcaaaccaaaaatatcgatctggcgctggcggggatcaccattaccgacgagcgtaaaaaagcgatcgacttctccgacggctactacaaaagcggcctgctggtgatggtcaacgccaataataacgacatcaaagatgtcaaagatctgaacggtaaagtggtcgcggtgaagagcggcaccggctccgttgactacgcgaaagccaatatcaaaaccaaagatctgcgtcagttcccgaacatcgataacgcctatatggagctgggaaccggtcgcgcggatgccgtgctgcacgatacgccgaatattctgtacttcatcaaaaccgcgggcaacggtaagttcaaagcggtaggcgaatcactggaagcgcaaaactacggtatcgccttcccgaaaggcagcgacgagctgcgtgagaaagtgaacggtgcgctgaaaacgctgcgcgacaatggtacctataacgaaatttataaaaaatggttcggcactgaacccaaa

SEQ ID NO: 12 - DNA, 1002 bp, Klebsiella pneumoniae
cggttcatctggctctatacggaattgaaaaacgctcccacattaaaaacgtattcagccgccgtggactggaacgtccccggccactattttgcagaaaccttttcgcgttctggaatgaacccgtctggccaatccatcaggggtgaaataatgaaaaaatcattggcatcaatgtgtctgagcgctgtattaacggtcgctttttcttatcacgccgtcgcggccgatcttccggaaatagaaaaatccggcaccttgaaagtggcgacggaagatgattatgcgccgtttaactttatgaataatggccaggctgatggctttaacaaagatatgcttgaggaattacgtaagtacgcaaaattccatgtcgaccagagcatattaccgtggaccggattattagcggctgtctccaccgggcaatacgatatggccttaaccggggcggttattaccgatgagcggctgaaggtctttgatttcaccccaccgtgggcctccgcgcagcactatttcgtcaaacgcgctggcgatacctcgctaaataccattgccgatctcagcggcaaaaaagtgggggtacaggccgggagcgcgctgctggcgcgtttgccggagctgaaggcgatgctggagaagaccggcggcaagctggggccggtggtggagtatccctcctatccggaagcctacgccgacctggcgaacaagcgactggattacgtgattaacgtggtgatctcggtaaacgacctggcgaaagccaaaccgaaggtcttcgccaaagggctggccgtctccggaccggggtatatggcgtggccgatcccgaaaaactcgccgcagctgctggcctatatgaccaggtttatgaaccacatgaaggagaccggcaagctcgccgaactgcagaaaaaatggttcggcgaaacctatgacaacctgccgaccgaggcgatcaccagcccggaacagtttcacaaactcgccggactg

SEQ ID NO: 13 - DNA, 1788 bp, Klebsiella pneumoniae
aacctgtacaatgtgcaaatcgttcgcttcgacgactatcagacgcgctcgaacgaaaaccgcatcaagctggtgccgatcccgccgagccgcggcattatttacgatcgcaacggcaccccgctggcgcttaaccgcaccatttaccagctggagatgatgccggagaaagtcgataacgtacagcagacgctggatgcgctacgcgacgtcgtcgatttaaccgacgatgacatcgccggtttcaaaaaggagcgcgcccgctcccatcgttttacctcgattccggtaaaggtcaacctcagcgaagtgcaggtggcccgctttgccgtcaaccagtaccgctttcccggcgtggaagtcaaaggctacaagcgtcgttattacccctataattcggcgctgactcacgtcattggctatgtctcaaaaattaacgataaagacgtcgaccgcctggataaagagggcaagctggccaactacgcctcgacgcacgacattggtaagctgggtatagagcgttattacgaggacgttctgcacggtcagaccggctacgaagaggttgaagtgaacaaccgcggccgcgtcattcgtcagctgaaagaggtgcctccgcaggccggacgcgacatttacctcaccctcgacctcaagctgcagcagtatattgaaacgctgctggccggcagccgcgccgccgtggtggtgaccgacccgcgtaccggcgctattctggcgctggtttcaaccccgagctatgacccgaacctgttcgtcgacggcatctccagcaaagattactccgcgctgctcaacgacccgaacacaccgctggtcaaccgagcgacgcagggggtctatccgccggcgtcgacggtcaaaccgtacgtcgccgtctcggcgctgagcgccggggtgatcacccgcaacaccagcctcttcgaccccggctggtggcagttgcctggctcagagaaacgctatcgtgactggaaaaagtggggccacggccatctgaacgtcaccaaagcgctcgaggagtctgcagatacctatttctaccaggtcgcctatgacatgggcatcgaccgtctctcagagtggatgagcaagtttggctacggccactacaccggtatcgacctctccgaggagcgctctggcaacatgccgacccgcgaatggaagctcaagcgctttaagaaaccctggtaccagggggacaccattccggtgggcatcggccagggttactggaccgccacgccgatccagatgaacaaagcgctgatgatcctgattaacgacggcgtggtgaaggtgcctcatctgctgcagagcaccgtggaagacggcaagcccgtaccctgggtccagccccatgagccgccggtaggcgatatccattccggctattgggaaatcgccaaagacggcatgtacggcgtggccaaccgcggcaacggcaccgcgcacaaatacttcgccagcgcgccgtataaaatcgcggccaagtcaggtaccgctcaggtgttcggcctgaaggccaacgaaacctataacgcgcaccggatctccgagcgcttgcgcgaccataaactgatgacagcgtttgcgccttataacaacccgcaggttgccgtggcgatgattctggaaaacggcggcgccggcccggcggtcggtacgattatgcgccagatcctcgatcacatcatgctgggcgataacaacactacgctgccaagcgaaaacccggcggtaaccgcaggggaggatcaa

SEQ ID NO: 14 - DNA, 2151 bp, Klebsiella pneumoniae
gcggaaaccgccaccgacgataaaaacagcgccgctgaagagaccatggtggtcaccgccgccgagcagaacctgcaggcgccgggcgtctccaccatcaccgccgatgagatccgcaaacgccccccggcgcgcgacgtctcggagatcattcgcaccatgccgggagtcaacctgaccggcaactccaccagcggccagcgcggcaacaaccgccagattgatatccgcggcatgggcccggaaaataccctgatcctgatcgacggcaagccggtcaccagccgcaactccgtgcgccttggctggcgcggcgagcgcgacacccgcggcgataccagctgggtgccgccggagatgatcgaacgcatcgaagtgattcgcggcccggccgccgcccgctacggcaacggcgccgccggcggcgtggtgaatatcatcaccaaaaaaaccggcgatgagtggcacggctcatggaacacctatatgaacgccccggagcacaaggatgaaggctccaccaaacgcactaacttcagcctcagcggcccgctgggcggcgattttagcttccgcctgttcggtaacctcgacaaaacgcaggccgacgcctgggatatcaaccagggccatcagtccgagcgtaccgggatctatgccgatactctgccggccgggcgcgaaggggtgaaaaacaaaaacatcgatggtctggtgcgctgggaattcgctccgatgcagtcgctggagtttgaggccggctacagccgccagggcaacctctacgccggcgacacccagaacaccaactccaacgacctggtaaaagagaactacggcaaagagaccaaccgtctgtatcgcaacacctactcggttacctggaacggcgcctgggacaacggggtgaccaccagcaactgggcgcagtacgaacgcacccgcaactcgcgcaaaggcgaaggcctggccggcggcaccgaggggatctttaacagcaaccagttcacggatatcgatctggcggatgtgatgctgcacagcgaagtcagcattcccttcgactatctggttaatcagaacctgacgctgggcagcgagtggaatcaacagcggatgaaggataacgcgtccaacacccaggcgctgtcgggaggcgaaattccgggctacgacagcaccggccgcagcccgtactcgcaggcggaaatcttctcgctgttcgccgagaacaacatggagctgaccgacaccaccatgctgactccggcgctgcgtttcgatcatcacagcattgtcggcaataactggagcccgtccctcaacctgtcgcagggcctgtgggatgacttcacgctgaagatgggcatcgcccgcgcctataaagcgccgagcctgtatcagaccaacccgaactacattctctacagtaaaggccagggctgctacgccagtaaagacggctgctatctgcagggtaatgacgacttaaaagccgagaccagcatcaacaaagagattggcctcgagtttaaacgcgacggctggctggcgggcgtcacctggttccgcaacgactaccgcaacaagattgaagcgggctatgccccggtctatcaaaacaataaaggtaccgatctctaccagtgggaaaacgtgccgaaagcggtggtggaaggtctggaggggacgttgaacgttccggtgagcgagaccgtcaactggaccaacaacatcacctatatgctgcagagtaagaacaaagagaccggcgatcgtctgtcgattatcccggaatacacgctgaactccaccctgagctggcaggttcgcgatgacgtttcgctgcagtcgaccttcacctggtacggcaagcaggagccgaagaagtacaactacaagggtcaaccggtcaccggcagcgagaagaacgaggttagcccctacagcatcctcggcctgagcgcgacctgggacgtcaccaaatacgtcagtctgaccggcggcgtggataacgtcttcgataagcgccactggcgcgcgggcaacgcccagaccaccgggggcgccaccggcacgatgtacggcgccggcgccgagacctacaatgaatcgggccgcacctggtacctgagcgtcaacacccacttc

SEQ ID NO: 15 - DNA, 1212 bp, Klebsiella pneumoniae
gtcgattttcatggctacgcgcgttccggcattggctggaccggcagcggcggcgagcaacagtgcttcaaagcgaccggcgctcaaagtaaataccgtcttggtaacgaatgtgaaacctatgcggaactgaagctgggccaggagctgtggaaggaaggggataagagtttttatttcgatactaacgttgcctattccgtgaatcaggaagatgactgggaaagcacctctccggcgttccgtgaagccaacatccagggtaaaaacctgatcgactggctgccgggctccacgctgtgggcgggtaaacgcttctatcagcgtcatgacgttcacatgatcgacttctactactgggatatctccggcccgggtgcaggtctggaaaacgttgaccttggcttcggtaagctctctctggccgctacccgtaactcagaaagcggcggctcttatactttctccagcgatgacaccaaaaaatatgctgcgaaaactgccaacgacgtctttgatatccgtctggcgggtctggaaaccaacccgggcggcgtgctggagttaggggtcgattacggccgtgctaacccgcaggatgactatcgcctggaagacggcgcgtcgaaagacggctggatgtggaccggtgaacatactcagtctatctggggcggcttcaacaagtttgtggttcagtacgccactgacgcaatgacctcctggaacagcggccactctcaggggaccagcatcgataacaacggcagcatgatccgcgttctggatcacggcgcgatggacttcaacgatgactggggcctgatgtacgtggcaatgtaccaggacgtggatctggacagcaagaacggttctacctggtacaccgtgggtgtccgtccgatgtacaaatggacgccgatcatgagcacccagctggaaatcggttacgacaacgtgaaatcccagcgtaccagcgaaaacaacaaccagtacaaaattactctggctcaacagtggcaggcaggcaacagcgtctggtctcgtccggctatccgtatcttcgcaacctacgcgaagtgggatgaaaactggggctacagcaacacctccggtctgcagacgaaagacagcagcggaagcggcgctttcacctccagccgcggtgacgacagcgaagttaccttcggtgcccagatggaagtgtggtgg

SEQ ID NO: 16 - DNA, 1896 bp, Klebsiella pneumoniae
atggctatcgaaatcaaagtaccggacatcggggctgatgaagttgaaatcaccgagatcctggtcaaagttggcgacaaagtagaagctgaacagtcgctgatcaccgtagaaggcgacaaagcctctatggaagtcccgtctccgcaggctggcgtcgtgaaagagattaaagtctccgtcggcgacaaaaccgagactggcaaactgattatgattttcgattccgccgaaggtgcagccgccgctgcacctgcgcaggaagagaagaaagaagccgctccggccgccgctgctccagcggctgccgcggcagcgaaagaagttcacgtcccggatatcggcggcgatgaagtcgaagtcaccgagatcatggttaaagtgggcgacaccatcgccgctgagcaatccctgatcaccgtagaaggtgataaagcctctatggaagttccggcgccgttcgccggtaccgtcaaagagatcaaaatcaataccggcgataaagtttccaccggctccctgattatgatcttcgaagtggcgggcgctgcgcctgcagccgctccggcacaggctgccgcgccggctgctgcggctccggctgccgcagcaggcgtgaaagatgttaacgtcccggacatcggcggcgacgaagttgaagtcaccgaagtgatggttaaagtcggcgataaagtcgcggcggaacagtccctgatcaccgtagagggcgacaaagcctctatggaagttccggcgccgttcgcgggtaccgttaaagagatcaaaatcagcaccggcgataaagtcaaaaccggttccctgatcatggtcttcgaagtggaaggcgctgcgcctgccgccgctccggctcaggctgctgcaccggcaccagctgctgccccggctcaggccgctaagcctgccgctgcgccggctgcgaaagcagaaggtaaaagcgaattcgctgaaaacgatgcctacgttcacgcgaccccgctgattcgccgcctggcgcgcgagttcggtgttaacctggcgaaagtgaaaggcaccggccgtaaaggtcgtatcctgcgcgaagacgttcaggcttacgtgaaagaagcggttaaacgcgctgaatccgcaccggctgctgccgcaggcggcggtatcccgggcatgctgccgtggccgaaggttgacttcagcaagtttggcgaagtcgaagaagtggagctgggtcgtatccagaaaatctctggcgccaacctgagccgtaactgggtgatgattccgcacgttacccacttcgacaaaaccgatatcaccgatctggaagcgttccgcaagcagcagaatgccgaagctgagaagcgtaaactggacgtgaaattcactccagtggtcttcatcatgaaagcggttgccgctgcgcttgagcagatgccgcgcttcaacagctcgctctccgaagatggtcagcgcctgacgctgaagaaatacatcaacatcggtgtggcggtggataccccgaacggtctggtggttccggtcttcaaagacgtgaacaagaagagcatcaccgagctgtctcgtgaattgaccaccatctcgaagaaagcgcgcgatggcaaactgacggctggcgaaatgcagggcggttgcttcaccatctccagcatcggcggcctgggtaccacccacttcgcgccgattgttaacgcgccggaagtggccatcctcggcgtgtctaagtccgcgatggagccggtatggaatggtaaagagtttgtgccgcgcctgatgctgccaatctctctgtccttcgaccaccgcgtcatcgacggtgctgatggtgcccgcttcattaccatcattaacaacaccctgagcgacattcgccgcctggtgatg

SEQ ID NO: 17 - DNA, 771 bp, Klebsiella pneumoniae
atggatcgtattattgaaaaattagatcgcggctggtgggttgtcagtcacgaacaaaaattatggttgcctggtggagaattaccacatggcgaagcggttaatttcgatcttgtcggccagcatgcgctgcatattggcgagtggcagggcgagtccgtgtggatggtgcgccaggatcgtcgccatgacatgggatcgttgcgccaggtgctggatcaggatccgggactcttccagctggctgggcgggggatccagctcgccgaattttatcgctcgcataaattttgcggttactgcggccacccgatgcatgccagcaaaagcgaatgggcgatgctgtgcagccactgccgtgaacgttactacccgcaaattgccccctgcattatcgtggcaatccgtcgcgacgatgcgatcctgctggcgcaacatacgcgccatcgcaacggcgtgcacaccgtgctggccggctttgtcgaggtcggcgaaacccttgagcaggcggtggctcgcgaggtgatggaggagagcggtattcgggtaaaaaatctgcgttacgtgacctctcagccatggccgttcccgcagtcgctgatgaccgcctttatggcggattacgcagatggcgagatcgtggtcgacaaaaaagagttactgaccgcggactggtatcgctatgacgacctgccgcttctgccgccgccggggacagtggcgcggcggcttatcgaagataccgtcgcgatgtgtcgggcagagttcgag

SEQ ID NO: 18 - DNA, 390 bp, Klebsiella pneumoniae
atgttttcatacattatgctgggaacgaacgatctgccacgcgccatcaagttctatgacccgttaatggcgctgctgggacacgtcaaagccggccgtaacgaacagggggcgtcctggggcaccttcaacggcaatcacacctgcgggctgtgcgtgggtgttccttttgaccagcagcctgccggggtgggtaatggaacgatggtggcgcttaacgcccgctccgtcgcacatattgcggaactgcatgccctcgccctgcaactcggcggacgtgacgaaggcggtcccggtcaccggccgcagtatggcgacggttttcacagcgcctacgtccgcgatcccgacggcaataagctggcgtttgtttactatgcgtcggcagat

SEQ ID NO: 19 - DNA, 1761 bp, Klebsiella pneumoniae
atgaacgtattacgcagaaagtggcaggggctgccgcgcggcgtggtggtgtgcatcacggcgctggtgatttatgtcccgctgttatttattgtggtgcagagttttctttcggcaccgttcttttcccgctccaaatcgtggagtctggaagccttcgcctttatttttaccgacccggatttttatctggcattaaggtcaggttttattctggcctttggcctggtgattatcgccattccgctgggcggtattttggcctttctgatggtgcgcaccgatttacccggccggcggatcattgagccgctgatcctggtgccgatcttcgtctcgccgatggtgctgggctttggctacgtggtggccgccgggccggtaggcttcttttcccagtgggcgcagcagctgatcggctttgtgccgtggaatatctactcgatgttcagcattgtggtcatcgccggcttaactcacgttccgcatgcctatctctatatctcttcggcgctgcgcagcgtcggctccgacgtggaagaggcggcgcgcaccgtcggcgccacgccgctgcaggtgatgacctcggtgagtctgccgatggtgcggccatccattctttacgcctgcgtgttgctctttttcctcggtctggaagtcttcggtctgatgctggtgctgggcgaccccgagggcaacatggtgctggcgacctatctctacaagctgactaacaagctcggcaccccctcctaccatctgatggcggcggtggcggtggtgctgatctgcatcaccatcccgctggtgatgctccagcggcggctgatgcgcaccgccaaccgctttgtcaccatgaagggcaaggcgtcccaggcgcgggcgctgccgctgggcaaatggcgctgggtggccggggcggtggtggtggcctggctgacggtgaccatcggcgtaccgctgctcggcgtggcgctgcgcgcttttatctccaactggggcgtcggcgtgtcgctgtgggatgagctgtcgctggcgacgttccacaatatctggcagcagcccaacctgctgcgggcgatcgtcaactcgatggctatcggcatcatcggcggcgcgctggcggtgatctgctatctgtttgtcggcatcgccatgcaccgcaaagcggacaacgtcacccgctttctcgactacagcgtgctggtcccgcgcgcggtaccggggctgctggccggcctggccttcctgtgggtattcctgtttgtaccgatgtggctcgatcagtcgctgaagcacggctggctctcggcgctgcggtggccgactggctgcgggagcaccttatcgtgcagctgcgccctgcgcaacaccatcttcagcgtctggctggcctacaccgtggtgtggatggctacgctgcggctcatctcctcgacgctgctgcaggtgggcccggagctggaggaggcggcgcgtagcaccggcgcctcgcgggggcagatcacccgccacgtgaccgttccgctgtcgcgctatgggctgattggctcctggctgctgatgttcctgatctttgagcgcgagtattccactggcgtctatctgctgtcgccgggtaccgaaaccatcggctcgatgctggtgtcgctgtgggcggcgggggccatcgatatcgtcgcggcgctctcctttatcaatattctgctggtggtgattggccttggtatcgccctgcgctttggagtgaaattacatgat

SEQ ID NO: 20 - DNA, 903 bp, Klebsiella pneumoniae
atgcaggatctcaatgacttcgcctggtttgtccaggtggtagaccatggcggtttcgccgcggcggggcgagcgcttgaccagccgaaatccaaactcagccgccgcattgcgcaactcgaggagcggttgggcgtgcgtttgattcagcgaaccacccgtcagttcgcggtcaccgaggtcgggcagaccttttatcagcattgcaaagcgatgctgattgaggccgaggcggcgcagcaggcggtcgagacgctgcgcgccgagccgcgcggtagcgtcaggatcacctgtccggtcaccttgctgcatgtccatatcggaccgatgctggcgcgatttatggcgcgctatcctggggtaacgctgcatcttgaggcgaccaaccgccgggtggatgtggtcggggagggcattgatgtggcgatccgcgtccgtccccggcccatcgaggatagcgacctggtgatgcgcgtgctggcggaccgcgggcaccggctggtggccagcccggatctcatttcccggctcggacgtccgcaggcgccgtccgagctgagcgcctggccgggcctcagcctgggtgcgaacaagcatcagcataaatggcagctcaccgggcccgggggagcgagagcggaagtgtatttcacgccgcgaatggtgaccaccgatatgctggcgctgcgcgaggcggcgatggccggcgtaggcgtggtgcagcttcctttattaatggtgcgcgatcagctggcgtcaggtgaattagaggtggttctggacgagtggcagccgcggcgggaagtgatccatgcggtatttgcctcacggcgcgggctgctgccctccgtcagggcgctggtggactacctcagtgaagagtatcagcggatggaggaagat

SEQ ID NO: 21 - DNA, 1143 bp, Klebsiella pneumoniae
atgagtggcgctaatgcgtccggctatttagaatcgcgcaccatgaaaactgagaccccaaccgtaaaaatggttgccattgctgctgatgaagcggggcaacgtatcgacaactttttgcgtacgcaattgaaaggcgtaccgaagagcatgatttatcgcatcctgcgtaaaggcgaggtgcgggtaaacaaaaagcgcgtgaagccggagtataagctggaagcgggcgatgaagtccgtatcccgccggtacgcgtggcggagcgtgaagaagaggcggtatcgccgcacctgcagaaagtggccgcgctctctgaggtgatcctctatgaagacgatcatattctggtgctcaataagccttctggtactgcggtacacggcggcagcggcctgagcttcggcgtgattgaagggctgcgcgccctgcgcccggaggcgcgcttccttgagctggtgcatcgtctcgaccgggatacctccggcgtgctgctggtggcgaaaaagcgctcagcgctgcgttcgctgcacgagcaactgcgcgataaaggcatgcagaaagattatctggcgctggtgcgcggccagtggcagtcgcataccaaagtggtccaggccccgctgttgaagaatattctgcagagcggggagcgcatcgttcgcgtgagtcaggaaggcaagccgtcggagacgcgctttaaagtggaagagcgttacgaattcgccacgctggtgcgctgcagcccggtcaccggccgcacgcatcagatccgcgttcatacgcagtatgccggccatcctatcgcttttgacgaccgctatggcgaccgcgagttcgacaagcagctgtccgctaccggcttaaaccgcctgttcctgcacgcggcggcgctgaagtttacccacccggggagcggggaggtgatgcgcgttgaggcgcccgctggacaaccagctgaagcactgtttacaggtgctacggaagagcaaataagcgcaacgcggaatcagttccgccgttttttttgcctcagcctaacagcgggttgtagttttcacggcgcaacatctgacagagcgcgattaagggtaaaccgaccagggtgttcgggtcgcggccttccagccgttcgaacagcg

SEQ ID NO: 22 - DNA, 2526 bp, Klebsiella pneumoniae
atgaataagataacaaagtacattgacgcattgccgctgtcggacgccgagaaatcggcgctgccggacaccagcctgcaggccgttcatcaggccctggatgacgaccatcagaccttcgcccgcgaagacgactccccgctggggtcggtcaaggcacggctggcgcatagctggccggattcgctgtctggcgatcagctggtgaaggatgatgaaggccgtactcagctgcatgcgatgcctaaagccaagcgctcctcaatgatcccggacccgtggcgtaccaacccggtcggccgcttctgggaccgtctgcgcggacgcgatgtcacgccgcgctatctctcccgtctgacgcaagaagagcgcgagagtgagcaaaaatggcgtaccgtcggcaccattcgtcgctatatcctgctgctgctgacgctgtcgcagaccgtagtggccacctggtatatgaaaaccattctgccttatcagggctgggcgctgatcaacccggccgacatggtggggcagaacctgtggatctcgttcatgcagcttctgccgtacgtgttgcagagcggcattctgatcctcttcgcggtgctgttctgctgggtttccgccggcttctggaccgcgttaatgggcttcctgcagctattgatcggccgcgataagtacagtatttccgcctcgacggtcggtgacgaaccgttgaacccggcgcaccgtacggcgctgataatgccgatctgtaacgaagacgttgaccgcgttttcgccggcctgcgggcgacctgggagtcggtgaaagcgaccggtaacgccgctcatttcgacgtctatatcctcagcgatagctataaccccgatatctgtgtggctgagcaaaaggcgtggatggagctgattgccgaagtgcagggcgaagggcagatcttctaccgccgccgtcgtcgtcgagtgaagcgtaagagcggcaacatcgatgacttctgccgccgctggggcagccagtatagctatatggtggtgctggacgctgactcggtgatgaccggtgagtgtctgagcagcctggtgcgcctgatggaagcgaacccgaatgccgggatcattcagtcttccccgcgcgcctcgggcatggacacgctgtatgcgcgttgccagcagtttgccacccgggtgtacggtccgctgtttacggcgggtctgcacttctggcagttgggggagtcccactactggggccacaacgccataatccgcgtgaagccgttcattgagcactgcgcgctggcgccgctgccgggcgagggcaactttgccgggtcgatcctgtcgcacgacttcgtcgaagccgcgctgatgcgccgtgccggctggggggtgtggattgcctacgatctgccgggctcctatgaggagctgccgccgaacctgctggacgagctgaaacgcgaccgtcgctggtgtcagggcaacctgatgaacttccgcctgttcctagtcagagggatgcacccggttcaccgggcggtgttccttaccggcgtgatgtcctacctgtcggcgccgctgtggtttatgttccttgccctgtcgacggcgttgcaggtggtgcatgccctgaccgagccgcagtacttcctgcagccgcgtcagctgttcccggtgtggccgcagtggcggcctgagctggccatcgcgctgttcgcctcgaccatggtgctgctgttcctgccgaagctgctgagtattattctggtgtggtgtaaagggccgaaagagtacggcggatttttccgcgtcacgctttcactgctgctggaggtcctgttctcggtcctgctggcgccggtccgtatgctgttccacaccgtcttcgtggtcagcgccttcctcggctgggaggtggtatggaattcgccgcagcgtgatgatgactccacgccgtggggggaagcctttatgcgccacggctcgcagctgctgctggggctggtgtgggcggtcgggatggcatggctggatctgcgcttcctgttctggctagcgccgattgttgtctcgctgatcctctcgccgttcgtgtcggcgatttccagccgggcgacagtgggcctgcgcaccaagcgctggaagctgttcctgatcccggaagagtattcgccgccgcaggtgctcaaggataccgatgcgtacctgacgatgaaccgtcagcgttcgctggacgatggctttatgcacgcggtgtttaatccgtcgtttaacgccctcgccaccgcaatggccactgcgcgccaccgtcagggtcatatcctggagatcgcccgcgagcgccatgtcgagcaggcgctgaatgaaacgccggataagctgaaccgcgatcgccgactggtgctgttgagcgacccggtaaccatgtcgcgtctgcactatcgcgtatgggccgcgccggagaaatactcttcatgggtgaacgcctatcagcagttggcgcttaacccgctggcgctgaaaacgaaa

SEQ ID NO: 23 - DNA, 600 bp, Klebsiella pneumoniae
atggaaatggctaaaattctggtgctttattattccatgtatggacacattgaaaccatggctcacgccgtcgccgatggggcgaaccgggtggacggcgttgaggtggttgtgaagcgcgtgccggaaaccatgcaggctgaagcattcgccaaagcaggcgggaaagcgcaaaacgcgcccgtcgccacgccgcaggagctggcagagtatgacgccatcatctttggtaccccgacgcgcttcggcaacatgtccggtcagatgcgtactttcctcgatcaaaccggcggtctgtgggcgtccggcgctctgtatggcaaaatcgccagcgtatttagctcaaccggtaccggcggcggccaggaacaaaccattacctcgacctggacgacgctggcccaccacggcatgatcatcgtcccgatcggctatggcgcccaggagctattcgatatttcccaggtacgcggcggtaccccttatggcgcaaccaccatcgccggcggcgacggctcgcggcagccgagcgaggaagagttagccatcgcccgctatcagggtgaacatgtcgccaaactggccgttaaactgcacggc

SEQ ID NO: 24 - DNA, 2319 bp, Klebsiella pneumoniae
gtggagcagcatgcaggcgactttagcgtcaccgtacgcgatgtgcgtcagctgacccagccggaaagcgatctgctgacgctgctgtgggtgctggagggaagcgtaaatctggcggtggcggaaggtgcgtcgcagccgctcgccgccgacgggctggcgatcgttaaccgcaaccgtcgctggagcctgcgcagcgccggggccaacgccgtgatgatcctcaccctctccgccaactggctggcccgcctcgataatgccttttttgccgtcgattaccagataacgccgcgcacccgggatgccgatgacggcctgcgccgcctgatgcgccagctgctggtgagcggcctggtcaatcatcctggccattaccgactggaggccaaccgctggctgagtgagatagcgctgctgctggccacgcgctttagccagcccatcgcctccacgccccggcgcgataccgaaaaatggagccggagaatagccagcgtggtggcgcggatcgacgctaactatcagcgtcgcctctcgttgcatgaggtggcggccgcggaatttgtctccgaggcctggctgtcacgcttatttcgcaaagaggtcggggtaagttttgtccagtacctcaccgcgctgcgcctgcgccacgccgccgaccagctattaaccacccgcaaaaccgtccagcaaatcgcccgcgaacagggattcgccagtacgcgaatgatgagcgatttgtttaagcgccagcacggcgtgacgccgcgccagtatcgtgaacagcatcctctggagcttgcccgaccgcgcccgccgcaggccgatcgctggcagccggtggcggccgaccggctgtatgcgcgactcaatgagccggaaccacgcgaccgggaaagtccccccctgccgatcaacccaccgcagacccgggagatcaatctgcgcgatcgtccagcgcgccccgcagcgctgcgccatacccggatggtggtgaccgtgcgcgaactggacgatctgctgcgtgaagatgtgcgccgggaactcgaacagctgcaccacgccctgccggtgtatgccatcgatatcaacgatccctttctcagcagtcggctgttcggcaccggctgggacgatccgcagatggccggctacgcctgctggtacaacctgcagcagatttttagctggctggcggcgatgggctggcaggtgatcctgcacaccggcgtcaccacccgcagtgacctgctgcagcgcttcctgcagctcgccgccaaccattttccgccagccacgctcaacagctggcgctttgtctggcactggtcgccgcaggccagcgaagctgcgcgccaggccgcctggcggcagcagcgcggggtccttcatcgcctgctgccgcagccgcagctggggatctggcaccgctttgctcccagcgatcccgggaacgatccgctgttccactcgccgctgctggcagaggcggattttctcgcctgccaggcagatgccaacgaacagctggatctggcccaggcagacagcagccgcctggcctccagcgaacattacccgctgcacaagctgcggcagatccacagcgccctgcgccagcgtcagctcaacctgccgctgtggctgctctcctggaatacgctgaccggcgatacgcgggataccaacggccgcttttttcgcggcgcgctgctgatggataatctgctgggggtggcggaccaggtctggctggcgggcttctggttaaattcaggcctccagggcgaagctcgcgccaacggcaagctcgatacctccagcctggcgctgcactatctgcacggcctgccgcgcccggtttactgggtactctggctctggcggcggctgcgcggcgagatcctggttcacgataaaaacctgctgctgctccaccaccagggtcactatcagctgctgctgcgcaatacggtggtctacaatccctggctctccagcgaagcggcctttatccagcgcttcagccagctctacagcgtgcggctgcagggcctggatggcagctggcgcatcaaacagcacctgttcgatcagcaccacggcgcgttgttcccgctggtggacgcctttcgcagccgcagcggccctgacgccgaggattatcagtggctgatgcatcaggcccgtccggcgctcagcgtggatgaagccaggctcgatggctattggctgcggatcgactcgctgcagagcaatgcgctggtgctgtatgaatttacccctcagctctcctccggcgcggatcccgccccc

SEQ ID NO: 25 - DNA, 945 bp, Klebsiella pneumoniae
atgaaagcagccgtggtttttgatctcgcagaaggcccggtttgggccgaatttatcgacccgcagcccgcgcccggccagacgctcattgacgtccgcgccgccgcgataagccatgtggttaaggcccgggcatccggacgccattacagcttcgacggcaatctgccctttgtgcctggtatcgatggcgtcggcaccacacctcagggccagcgcgtctacttcgccttccccaccgcccccttcggcagtatggcgcagcgggcgccggtcgccctgcagaattgtctgccgctgccggatgcgctcgatgatatccaggcggcggcaatggccaaccccggtatgtccgcgtgggcatcgctggtgacacgcgcccagcttcaggccggcgaaacggtgctgattaatggcgccaccggcagcgccggtcagttggcggtacagattgcccgctatctgggggcgaaaaaaatcattgcaaccgggcgcaatgcgcagtcgctcgcggcgctggacgccgatgagtgtattcagttaaccgctgatgataaaaccttgagcgggcaattttcagcggtcagcgccgcgcagatcgatgtggtcatcgattacctgtggggacacagcgcggaattattattgccggcactggcgaaatatacccctgccggcagtccggtgcgctatgtgcaggtgggttccctggctggcgccgatatcgcgttaaatggcgcagtgctgcgttccgccccgctcctgctgatgggcagcgggatcggtagcctgtcggtatcgcagctgctggcggcgaccggcgaaatgctgcaggcggcggtgccggggaaattgaccatcgccaccaccccgcggccgctgcaggagatcgcggcggcctggccacaggacgacagccagaagcgcacggttttcaccctcgga

SEQ ID NO: 26 - DNA, 1446 bp, Klebsiella pneumoniae
gtggatctctccattattatcagcgcggttatcgcactggcagccgggttaatggtcggctggctggcgaccaaagcgcgcgccgatcaaattcgggccgatctcatcgaggaacggcgagagttggatattgagctgagcgccgcccgccagcaactggcgcaggaggcccactggcgtgaggagtgtgagctgctgaacaacgagctgcgcagcctgcgggatatcaatacctcgctcgaggccgatctccgtgaggtcaccacccggctcgaatccacccagctgcatgcggaagataagatccgccagatgatgaacagcgagcagcgccttagcgagcagtttgaaaacctcgccaaccgtattttcgaacacagcaaccggcgggtcgatgagcaaaaccgccagagcctgcatggcctgctgacgccgctacgcgaacagctggacgggttccgccgccaggtgcaggagagctttggccaggaggcgcgtgaaagacataccctggcgcatgagatccgcaatctgcagcagttgaacgcgcagatggcacaggaggcgctgaacctgaccaaagcgctgaagggggataacaaaactcagggcaactggggggaagtggtcttaacccgcgtgctggaggcctccggcctgcgcgaaggctatgagtaccagactcaggtcagtattgagaccgacaaccgctcgcggatgcagccggacgttatcgtgcgcctgccgcagggtaaggacgtggtgatcgacgccaaaatgaccctggtcgcctatgagcgctatttcaacgccgaagacgactacacccgcgaagtcgcgctgcaggaacaccttgcctcggtgcgaaaccatattcgcctgctgggacgcaaggattatcaacagctgcctggcctgcgctcgctcgactatgtgctgatgtttattcccgttgagccggcgttcctgctggccatcgatcgccagcctgagctcatcagcgaggcgctgcaaaataatattatgctggttagcccgacgacgctgctggtagccctgcgcactatcgccaatctgtggcgctatgagcaccagagtcgtaacgcgcagaagattgccgagcgggcggggcgcctttacgacaaaatgcgcctgtttgtggatgatatgtccgccatcggccagagcctggataaggcgcaagagagctatcgccaggcgatgaaaaagctcgcttccgggcgtggtaatctgctggcccaggcggaggcctttcgcggcctgggcgtggaggtcaagcgcgggattaatcctgatttagtcgaacaagctacggctcaggacgagcaatatcgtctcgaagatgaggataacctgccggaaaatgacgcattttcagccgactctgccgagacggtgcgtagccgggaggcggctccgccacgc

SEQ ID NO: 27 - DNA, 1194 bp, Klebsiella pneumoniae
atgttgaatgtggaaatgctgtccaccggcgatgaagtgttgcatggtcaaatcattgataccaatgcggcatggctggcggatttcttttttaatcagggtttaccgttaacgcgccgcaataccgttggcgacgatctcgatgcgctggtggcgattctgcgcgaacgcagcgaacaggcggatgtgctgatcgtcaacggcggcctcggcccaaccagcgacgacctgagcgcgctggccgccgccactgcgaaaggcgaggggcttattttgcatccggagtggctggaaaccatgacccgcttttttgccgagcgcggcaggccgatggcggaaagcaaccgtaagcaggcggaaatcccggccagcgccgagatgatcaacaacccggtcggtacggcctgtggctttgccatccagctcaaccgctgcctgatgtttttcactcccggggtcccctctgaatttaaggtgatggtcgagcaggaaattttaccgcgcctgcgccagcgctttacgctgccggacccgccggtatgcctgcgtttgaccacctttggccgctcggagagcgagctggcgcaaagtcttaatccgctgacgctgcctccgggcgtggtgatgggttaccgctcgtcgatgccgatcattgaactcaagctaaccggaccggccaaccagcgcgacgccatgctggccctgtggccggaggtgcgtaaggtggctggcgacagcctgattttcgaaggtacggaagggttacccgcgcaaatcgcccgctgtctgcaggagcggcagctgagcctgacgctcagcgagcagtttaccagcggcctgctggcgctccagctgtcccgcgccggcgcgccgctgctggccagcgaagtcgttccggcgcaggaggagacgctggcgcaggcggcccgctgggcggccgagcggcgcataaaccattttgccggcctggccctggcggtgagcggtcaggaaaacgatcatcttaacgtggccctggccaccccggacggcaccttcgcgctgcgggtgaagtttagcgccacccgccacagcctggcggtacgccaggaagtctgcgctatgatggcgttaaacatgctgcgtcgctggctgaatggtcaaccactggccagcgaacatggctggattaacgtggtggattccctctcgctg

SEQ ID NO: 28 - DNA, 945 bp, Klebsiella pneumoniae
atgattgaatttcaaggggtcagcaaagtgtttgccggccacccggcggtgaaggacctgaccctggagctgcgcgaaggcgctttctcggtgctggtggggacttccggctcgggcaagtcgacgacgctgaagatgatcaaccgtctgctggagccggaccggggcaccattcgctttgccggcgaggacattcgccagcagccggtcctgaccctgcggcggcggatgggctatgccatccagtccatcggcctgtttccccactggacggtggcgcagaatatcgccaccgtgccgcagttgcaaagatggccgcgggcaaggatcgccgaccggatcgacgagctgatggcgctgctggggctggaggcgacgctgcgcgaccgttacccgcatcagctctccggcggccagcagcagcgggtgggggtggcgcgggcgctggcggcagatccggaggtgctgttgatggatgagcccttcggcgccctcgacccggtgacccgcgaggcgctgcagcaggagatgctgcgcattcaccgtctgctgggacggacgattgtgctggtgacccatgatattgacgaagcgctgcgtctggcggaccacctggtgctgatggacgggggcgaggtggtccagcagggggcgccgctggagatgctcctgcgaccgaaaaatagctttgtacagaccttttttggtcgcagcgagctgggtgtgcgcctgctgtcgctgcgcgaggtgggggactatttgcgtcccgacgaacggctggcgggcgaggggctgaccgtcaccatgaccctgcgggaagcgctgtcgcagtttgtcgcccggcgctgcgagacgctgccggtggtcgatgccgaaggcaggccctgcggtacgctgcattttgccgatctgctgcgccaggagatgagccatgaaggcgcttcg

SEQ ID NO: 29 - DNA, 1068 bp, Klebsiella pneumoniae
atgaaaatgaaacttaccgcgctgatgagcggaatgattctgtccagttcggcgctgtgcttcagcgcgacagcggctgataaaatggtcatcgcccaccgcggcgccagcgggtatctgccggaacataccctgccggcgaaagcgatggcttacgctcagggggcggattaccttgagcaagacctggtgatgaccaaagacgaccggctggtggtgttacacgaccactatctcgatcgggtgactgacgttgcgcagcgtttcccgcagcgggcgcgtaaagatggccgtttctacgccatcgactttaccctggacgagattaagtcgctgaagttcaccgaaggttttgagccgaaaaatggtaagaacgtgcaaacctatcccgggcgattcccgatgggcaaatccgatttccgtattcatacctttgaagaggagattgagtttgtccaggggctgaaccattcaaccggcaaaaacatcggtatctacccggaaatcaaagcgccgtggttccaccaccaggaaggcaaagatattgccgccagcacattgaaggtgctgaaggaatatggctataccagcaagcaggataaggtttatctgcagtgctttgacgccaacgagctcaaacgcattaaaaatgagctggagccgaagatggggatggatctcaatctggtgcagctcatcgcctataccgactggaatgaaacccagcagaaacaggccgatggtaagtgggtgaactacagctatgactggatgttcaagccaggggcgatggcgcagattgcgcagtacgcggacggtatcggcccggattaccatatgctggtagcggaaggctcgaagccgggggcggtgaagctgacggcgatggtgaaagaggcgcatgccagccatctgcaggtgcatccgtacaccgtgcgcgcggatcagttgccggagtacgcgactaacgttaatcagctctatgacgtgctgtataaccaggcgggcgtcgacggcttatttaccgatttcccggataaagcggtgcagttcctggacgcgaaacgc

SEQ ID NO: 30 - DNA, 1059 bp, Klebsiella pneumoniae
atgcgaccaacaatgatgacatatatcagtgaagagccggcctgcctggcgcagatcctgcgcgactaccggcaaaagctggcgccgattgaaaccttcgtccgccagcacccggtacggcgaatattattgctcgcgaccggatcgtcgctgaatgccgcgctgtgcgcgcgctatttctttgagcaacgcttcggtgtgctgcttgacattaaagagccgtacaacttcacccattacgacgcgatcgacccgcatgccgatctggtggtggcgatttcacagagcggaaaaagcgcgtcgacgctggaggcgatgcgtaaggtacaggcttccggcaagtcggttttcgccctgacctcagatccgcaaagcccgataggaggcgccagcgatggcgttctggatattaataccgggatcgagagcgtagggtttgtgacccgcggctttagcgcgacggtgctcaacctgttgctgatagcgctgatcattgctcgtaagcaggagaaagccagcgaggtcgaggagcagcactatctcgctgaattgcagcggctggtagcggcgatcccggaggttatcgtccgcacctcgcgctttattgaccgccatagcgaaacgctgcgcagcggcgagcgctttgtcgccaccggctacggcgcgctggttggcgtggcgaaggagttcgaaaccaaatttaccgagacggtgcgcgtgccttccagcggctttgagctggaagcctatatgcatggcccctatctggaagccaatgcccgccatgtgatgctgtttattgaagatacgccggacgcgcgaacccgggcgctgcgcgactatctggcgccgtccattggccgggcctttaccctgacgctgggtgacgaagaggatgctcaaacgctggcgctaaactgtccgtgcgagcatcacctggcgcctctgctgctgattgtcccagtgcagatgctcgcctggcataccgcaggactgaaaggcatcgatctggctaaacgtattttcgacgattttgaccgcgtcttaaaaagtaaaatc

SEQ ID NO: 31 - DNA, 2814 bp, Klebsiella pneumoniae
atgagtgactataaatcgaccctgaatttgccggaaacagggttccctatgcgtggcgacctcgccaaacgcgaaccgggaatgctggcgcgttggaccgatgatgacctgtacggcatcattcgtgcagccaaaaaaggcaaaaaaaccttcattctgcatgatggccctccttatgcgaatggcagcattcatattggtcactcggtaaacaagattctgaaagacattatcgttaagtccaaaggactgacgggctatgactcgccttacgttccgggctgggactgccacggtctgccgatcgagctgaaagtggagcaggaatacggcaagccgggtgagaaatttaccgctgccgaattccgcgctaagtgccgcgaatatgccgccgagcagatcgatggccagcgtaaagactttatccgtctcggcgtgctgggcgactggtcgcatccgtacctgaccatggacttcaaaaccgaagccaacatcatccgcgcgctgggcaaaatcatcggtaatggccacctgcataaaggcgccaaaccggtgcactggtgcgtagactgccgttccgcgctggcggaagcggaagtggagtattacgacaaaacctctccgtctatcgatgtcgcgttccacgcggtagacaaagccgcggtactggcgaaattcggcgtagccgacgtcaacggtccggtgtcgctggttatctggaccaccacgccgtggaccctgccggccaaccgcgctatctctctgtctcctgagttcgactatgcgctggtgcaggttgacggccaggcgctgatcctggcgaaagacctggttgagagcgtaatgaagcgcgttggcgcgacggactacactattctggcggcggtacaaggttctgagcttgagctgatgcgctttaagcatccgttcctcgatttcgacgtgccggcgatccttggcgaccacgtgacgctggatgccggtaccggtgcggtgcataccgctggcggccacggtccggacgactacaccatcagccagaaatacggtctggaaatcgccaacccggttggcccggacggcgcttacctgcctggcacctggccgtccctggacggcattaatgttttcaaagccaatgacatcatcgttgagatgctgcgtgagcgtggcgcgctgttacacgttgagaaactgcagcacagctatccatgctgctggcgccacaagtcgccgatcatcttccgcgccactccgcagtggttcgtgagcatggatcagaaaggcctgcgcgcgcagtcgctgaaagagatcaaaggcgtgcagtggatcccggactggggccaggcgcgtatcgaatcgatggtcgctaaccgccctgactggtgtatctcccgtcagcgcacctggggcgtgccgatgtcgctgttcgtgcataaagaaacccatgaactgcacccgcgtacccttgagctgatggaagaagtggcaaaacgcgttgaagttgacggcatccaggcgtggtgggatctcgattcccgcgacattcttggcgatgacgccgacagctatgagaaagtgccggataccctcgacgtctggtttgactccgggtcgacccactcttccgtggttgacgtgcgtccggaattcgccggtcacgccgccgatatgtatctggaaggttctgaccagcatcgcggctggttcatgtcctcgctgatgatttccacggcgatgaaaggcaaagcgccatatcgtcaggtactgacccacggcttcaccgtcgacggtcagggccgcaaaatgtccaagtctatcggcaacaccgttagcccgcaggacgtgatgaacaagctcggcgccgatatcctgcgcctgtgggtggcttccaccgactacaccggcgaaatggcggtctctgacgagatcctcaaacgcgccgccgacagctatcgtcgtatccgtaataccgcgcgcttcctgctggcgaaccttaacggtttcgatccggtgaaagacatggttaaaccggaagagatggtggtgctggaccgctgggcggtcggctgcgcgcaggcggcacaggaagatatcctgaaagcctacgaatcctacgacttccatgaagtggtgcagcgcctgatgcgcttctgctccatcgagatgggctcgttctacctcgacatcatcaaagaccgccagtacaccgccaaggcggacagcgtggcgcgtcgcagctgccagaccgcgctgttccatatcgtggaagcgctggtgcgctggatggcgccgatcatgtccttcaccgcagatgaaatctggggctatctgccgggcgagcgtgagaaatatgtcttcaccggcgagtggtatgaaggtctgttcggcctggccgacgacgaagcgatgaacgacgatttctgggatgagctgctgaaggtgcgtggcgaagtcaacaaggtgatcgagcaggcgcgtgcggataagaaagtcggcggctcgctggaagcggcagtcacgctgtatgctgatgccgatctggcggctaagctcaatgcgctgggcgatgaattgcgatttgtcctgttgacctccggggcgaacgtcgcagactatgcgagcgcgtccgctgatgcgcagcaaagcgaactgcttaaagggctgaaagtcgcattgagtaaagctgaaggtgagaaatgcccgcgctgctggcattacaccaccgatatcggcaaggtggcggaacacgcggaaatctgcggacgctgtgtgagcaacgtcgccggtgacggcgagcaacgtaaattcgcc

SEQ ID NO: 32 - DNA, 1035 bp, Klebsiella pneumoniae
atgacagatcaaccgcaacgccatcgccgctgggtgctggcttcccgtccccatggtgaaccgacggcagagaatttccgcctggaagagagcgaagtgccgacgccaggcccgggtcaagtgctgctgcgtaccgtttatttatcgctcgacccgtatatgcgcgggcgcatgagcgacgcgccgtcctattcgccgccggtggccattggcgcggtgatggtgggagggaccgtgagtcgcgtggtcagctcaaatcatgccgattatcaacccggcgactgggtgctgggctacagcggctggcaggattatgaactctccgacggcagcggactggtgaagctgggtgacaatccgcaacacccgtcctggtcgctgggagttctggggatgcccggcttcaccgcctacatgggtttgctggaaatcggccagccaaaggcgggcgaaacgctggtggtcgccgcggcgaccgggccggttggcgccacggttggacagatcggcaaaattaagggctgccgcaccgtcggcatcgctggcggcgcggaaaaatgccgctatgcggttgagacgttaggctttgatctctgccttgaccatcgtgcggatgattttgccgaacagctggccaaggcctgcccgcagggtattgacgtttattatgaaaacgtcggcggcaaggtttttgacgcggtgctgccgctgttgaataccgcagcgcgggtacccgtctgcgggctggtgagcggctataacgccaccgggctgccggacgggccagatcgtctgccgctgctgatggcgaccatcctcaaaaagcgcatccggatgcagggctttattatcggccaggattacgggcatcggatcgccgaattccagcagcagatggggcgctgggtgcaggaggggaaaattaaatatcgcgaacagctgatcgacggtctggaccaggcaccgcaggcgctgatcggtctgttaaaaggcgagaacttcggtaaggtagtgatccgcgtcgcggcggacgac

SEQ ID NO: 33 - DNA, 2409 bp, Klebsiella pneumoniae
atgaccaaccactgggtggatatcaaaaacgccaacgtcgtggtggtgatgggcggtaacgccgccgaagcccatccggtgggtttccgctgggcgatggaggcgaaaaacaataacgacgccacgctgatcgtcgtcgacccgcgctttacgcgtaccgcgtcggtggccgatatctatgcgccgattcgttccggtaccgacattaccttcctgtcgggcgtgctgctgtacctgatcgaaaacaataagatcaatgccgagtacgttaagcattacaccaatgccagcctgctggtgcgggatgattttgccttcgaagaggggctgttcagcggctacgatgcggaaaaacgccagtacgataaatcgtcctggaactaccagttcgatgaaaacggctacgccaaacgcgatgaaacgctcacccacccgcgctgcgtgtggaatctgctgaagcagcacgtttcccgttacacgcccgaggtggtcgaaaacatctgcggtacgccgaaagcggacttccttaaagtgtgcgacgtgctggcctcaaccagcgccgcggaccgcaccaccaccttcctgtatgccctgggctggacgcagcacaccgtcggcgcgcagaacatccgtaccatggcgatgatccagctgctgctcggcaatatggggatggccggcggcggcgtcaacgccctgcgcggccactcaaatattcaggggctgaccgatttgggcctgctgtcgaccagtctgccgggctatttgacgctgccatcggacaaacagaccgatctgcaaagctacctcagcgccaacacgccgaaggcgaccctgcccgagcaggtgaactactggagcaactacccgaaattcttcgttagcctgatgaaatccttctacggcgaggcggcgcaaaaagagaacgactggggctttgagtggttaccgaagtgggaccaggcttacgacgttatcaaatacttcaatatgatggataacggcaacgtcaccggctatatctgccaggggtttaacccggttgcctccttcccggacaaaaacaaagtggttcgcagcctcagcaagctgaaatatatggtggttatcgacccgctggtgaccgaaacctcgaccttctggcagaaccacggcgagtctaatgatgtcgacccgtcggcgattcagaccgaagtcttccgtctgccgtcgacctgctttgccgaagaggacggttcgatcgccaactccggccgctggctgcagtggcactggaaaggtcaggatgccccaggtgaagcgcgcaatgatggcgaaatccttgccgggatttaccatcgcctgcgcgaactgtaccgcaccgaaggcgggaagggcgcggaacccctgctgaagatgagctggcgctacaagcagccggaccatccggaatcggaagaggtggcaaaagagaacaacggctacgcgctggcggatctctacgatcaaaatggcactttgctggcgaaaaaaggccaactgctcaatagcttcgcgctgctgcgcgatgacggcagcaccgcgtcgtcttgctggatctataccggcagctggaccgagcagggtaaccagatggcgaatcgtgataacgccgatccttcgggcctgggcaatacgctgggatgggcctgggcgtggccgctcaatcgtcgggtgctgtacaaccgcgcttcggccgatatcaacggcaagccctgggatgcgaagcggatgctgatccagtggaacggcaacaagtgggtcgggaatgatattccggacttcaataccgcgccgccagggagcaacaccgggccgtttatcatgcagcaggaggggctgggtcgcctgtttgcgctcgataaactggcggaagggccgttcccggagcactacgagccgatggaaaccccgcttggcactaacccgctgcacccgaaggtggtctccagcccggtggtgcggttgtatgaagaggacgccattcgcttaggtaagaaggataaattcccgtatgtcgggaccacctatcgtctgaccgagcatttccacacctggaccaagcatgcgttgctcaattccatcgcgcagccggaacagtttgtcgaaatcagcgaagggctggcgaaaagcaaaggtatcgctaacggcgattgggtgaaagtcagcagcaagcgcggcttcattcgcgcggttgccgtggtgacccgccgactgcgcacgctgaacgtcaacggccagcaggtggagaccgtcgggatcccgctgcactggggttttgaaggcgtggcccgcaaaggctacatcgccaacaccctgacgcctaacgttggcgattccaactcgcaaacgccggagtacaaggcgttcctggtcaacatcgagaaagcg

SEQ ID NO: 34 - DNA, 1965 bp, Klebsiella pneumoniae
atgcttcccggccgttacgccgttggcttttccagtgattcaggtgatgtaccgctaatgccccttttgagagatgaaattcgcgaccactccgcggaagagatgctgtttatccgccgggccgcaattgcttttctgctggtggtggtctgctttggcgtgctgatcgttaacctctaccatctgcaggtggagcagcacgatttttaccagacccggtcaaaccagaacgacatcaaaatgctgcccatcgcccccagccgcgggctgatattcgatcgcaacggtattccgctggtgcagaatatcaccctgtatcgcctgcaggtgatcccgagcaaaattcccgatatggccgcgctgttgcagcagctgacgcctatcgtcgacctgacgccggacgacatcgccagctttcgcgacgatatgcaccacaccagccgctacaaagcggtcaccctcaagtcagacctcagcgatgtggaggtggcccgcttcgcggtcaacgaattccgtttccccggcgtgacggtggagagctaccaacaacgggaatacccctacggcgcagagctggcgcacgtggtgggctatgtgtcgaaaatcaacgacagcgatctgcagcggctggcgaaaaacggcgaagaggagaactacgccgccgaccgcaatatcggtaagcagggcatcgagggctattatgaaaaagcgctccacggcaccaccggctatcaggaagtggaggtggataaccacggccgggtggtgcgtctactgaaagaggtgccgccggtggccggaaaaaacctctatctgactctcgaccttcatctccagcagtatattgagtcggtgctgaagggacagcgggcggcggtggtggtggtcgacccgcgggatggcggcgtgttggcgatggtctccagtcccagctacgatcctaatccgttcgtcaaaggtatcggctatcaggcctataaatcgctgctggagaatccggaccggccgctgatcaaccgcgtcacccaggggctatatcctccggcttcgacggtcaaaccctatatggcgctgtcggcgctctccgctggggtcatcaccccgaacaccaccttcttcggggcgccgacgtggacgctgccgggcacgcaacgccgctaccgcgactggctgaaaaccggccacggcatgctcaacgtgactaaagccatcgaagagtcagcggacacctttttctatcaggtcgccttcgagatgggcattgaccggatccatgaatggctgagcaagtttggttacggccagtccaccggcatcgaccttaatgaggagtacgccggggtgctgcccagccgggagtggaaacagcgggtgcataaaaagccctggtatcagggggacaccatctcggtcggcatcggccaggggtactggatcgccaccccgatccagatggtgaaggcgcttaccactctgctgaacaatggtaaggtacaggatccgcatctgctctattcgatgaagcagggcaaccatgtggaacgttatcagcagccggcgaacctgccgcaggtgggtgacccgaaatccccgtactggggcattgtgcgcaacggcatgtatgggatggcgaatcagcccaacggcaccggctataagctgtttcatactgcgccgtatcagatcgcggcgaagtccgggacctcgcaggtctttagcctgaagcaaaaccagacctataacgccaaaatgatcccggtgcgtctgcgcgaccatatcttctacaccctgtttgccccttatcagcatccgaaggtggcgatggcgctgattctggagaacggcggcggggatggggtggtggccggaccgacggcgcgcgccatcctggaccatatttttgtcccgcagcaggcatcttcggcggcagccgatgtgccgcagcgtgatagcgccgatgcccag

SEQ ID NO: 35 - DNA, 1116 bp, Klebsiella pneumoniae
atgaatatctgctgcgcaaacgcgaaggcgatagcgggcaaaaattccagcctgaaccttacagagatgccagcaatgaatccggccagtaagaaaaatattcttgtcctggcggccctgggcgctgccgccctggcggcagcgagctacggcgcttactggtggcataccgggcgctttatgcagaccaccgatgatgcctatgtcggcggcgacattagcgccatctccagcaaagtctccggctatatccagcagctggcggtgcaggacaatatggcggtgaaaaaaggtgacctgttgatccgcattgacgaccgcgattatcgcgccgccctcgcgaaagccgccggagaagtggcggcgcagcaggccgcgctggccgatatccaggctacccgccagcttcagcaggcgaccattaccggctctgcggcctcgttactggccgccacggcggcaaccgaaaaactggctaacgacaaccgacgctataacgccctggccgcgtcgagcgcgatttccgcacagatccgcgataacgcctccgccgattatcgccgggcgcacgccgagcaggagaaggccaaagcggataaaaccgtggccgaacgtcagctggcggtgctggatgctcgccagcagcaaatcctggctgccctggcgcaggcccaggctaacctcgagattgccaggctgaacctcagctataccgacattcgcgcaccgttcgatggggtgattggcaaccgccgcgcgtggtccggctccttcgtcagcagcggtacgcagctgctctccctggtacccgcgcacggcctgtggattgacgctaacttcaaggaaaaccagctggcgcatatgcgtgccggccagccggtgaccatcgtcgccgatgtgctgccgaaccatacctttaaggggcatgtcgccagcctggcgccggcgaccggctcacgcttcagcattctgccggcggagaacgcgaccgggaatttcactaaaatcgtgcagcgggtgccggtccgcattgcgctggaaggtgacggggcaaagcttgacgtcctgcgcccgggactgtcggtgatcgtcaccgtgaacgaaaagagccctcga

SEQ ID NO: 36 - DNA, 540 bp, Klebsiella pneumoniae
atgctattaatgcaacgaatcacaaagctggataacgacttaacctgtaagggaatgctgatgaaactctggaataaaacactactcgcttccgccctgtgcctgaccctgtttggctgcgacgatgcgtcgaaagttgataacaaactggataaggctaaagataatgcggagcagatgaaggatgccgcggcggataaagcgcaggcaattaaacaggatgcggataaacaaatcgatacgctgaaaagccaggctgacgccgaggccgatcgcctgaaggatcaggccagcgccatcaaggccgaggcggacaagaaggcggacgccatcgcccagcaggcgaaagcccaggccgatgcggtgaagcagaacgcaaagcaggaaagtgaccgcatagtcaaagaggcgggtcagatcaaagacaacgccatcggtgacgccaatcagctctcggctgaagcggcgagcaaaaccaaagccatccaggacagtatcgcgaaggataaacagaacgccgcgccgcctgccgcacagcag

SEQ ID NO: 37 - DNA, 504 bp, Klebsiella pneumoniae; identical to SEQ ID NO: 4

SEQ ID NO: 38 - DNA, 2559 bp, Klebsiella pneumoniae
atgagcacaattgacaatctcgacgcccacacgccgatgatgcagcagtatctcaagctaaaggcgcaacatcctgacattctgctgttttaccggatgggggatttttacgagctattttatgacgatgcgaaacgcgcctcgcagctgctcgatatctcgctgaccaagcgcggcgcctccgcgggcgaaccgatacccatggccggcatcccccaccacgccgtagagaactacctcgccaaactggtcaatcagggcgagtcggtggccatttgcgagcagattggcgacccggccaccaccaaggggccggtcgagcgtaaagtggtgcgtatcgtcaccccgggcaccattagcgatgaagcgctgctgcaggagcgccaggacaacctgctggccgccatctggcaggacagcaaaggcttcggctacgcgacgctggatatcagctccgggcgctttcgtctgagcgaaccggccgaccgcgaaaccatggcggcagagctgcaacgcaccaacccggcggaactgctgtatgcggaagattttgccgaatcgtcgctgatcgagggccgccgcggtctgcgccgtcgcccgctgtgggaatttgaaatcgacaccgcgcgccagcagctaaacctgcagttcggcacccgcgatctggtcggcttcggcgtcgaaaacgccccgcgcggcctgtgcgccgccggctgcctgctgcagtatgtcaaagacacccagcgtacctcgctgccgcacatccgctccatcaccatggaacgccagcaggacagcatcattatggatgccgccacccgccgtaacctcgagatcacccagaatctggccggcggcaccgacaacaccctggcctcggtactcgactgtacggtgacgccgatgggtagccggatgctcaagcgctggctgcatatgccggtccgcgataccgccgtgctggtggagcgccagcagaccatcggcgcgctgcaggagcgctataccgagctgcagccggtgctgcgccaggtcggcgatctggagcgtattctggcgcgtctggcgctgcgtaccgcgcggccgcgcgatcttgcccgcatgcgtcatgccctgcagcaactgcctctgctgcgtgagctgctggccgacgttgacagtcagccggtgcaaaaattgcgcgagaaaatgggcgagttcaccgaactgcgcgaactgctggagcgtgcggtgatcgacgccccgccggtgttggtccgcgacggcggggtcatcgccccgggctatagcgaagagctggacgagtggcgggcgctggccgatggcgccaccgattatctcgataagctggagatccgcgagcgcgagcggctgggcctcgataccctgaaagtcggctacaacgccgtccacggctactacatccagatcagccgcggccagagccacctcgcgccgatccactacgtgcgccgccagacgctgaaaaacgccgaacgctatattattcctgagctgaaggaatacgaagataaggtgctgacctccaagggcaaagcgctggcgctggaaaaacagctttatgacgaactgttcgacctgctgctgccgcatctcgccgatctgcaaaccagcgccagcgcgctggccgagctggacgtgctggtcaacctggcggaacgcgcggaaaccctgaactactgctgcccgacctttagcgataagccaggcattcgcattagcgaaggccgccatccggtggtcgagcaggtgctgaaagagccgtttatcgctaacccgctgcagctggcgccgcagcggcggatgctgatcattaccgggccgaacatgggcggtaaaagtacctatatgcgccagaccgcgctaattgcgctactggcctatatcggcagctacgtcccggcgcagaaggtggagatcgggcccatcgatcgcatcttcacccgcgtcggcgcggcggatgacctggccagcggccgctcgacctttatggtggagatgactgaaaccgccaatatcctgcacaatgccaccgagcatagcctggtgctgatggatgagattggccgcggcacgtccacctacgacgggctatcgctggcgtgggcctgtgcggaaaatctggccaacaaaatcaaggcgctgacgctgttcgccacccactacttcgagctcacccagctgccggagaaaatggaaggcgtcgccaacgtccacctcgacgcgctggagcacggcgataccatcgcctttatgcacagcgtgcaggacggcgcggccagcaagagctatggcctggcggtcgccgcgctggcgggggtgccgaaagaggtgatcaagcgcgcgcggcagaaactgcgcgagctggagagtatctcgcccaacgcggcggcgacccaggtcgacggcacgcagatgtcgctactcgccgccccggaagagacctcgcctgcggttgaggcgctggagaatcttgatccggactccctgaccccgcgtcaggcgctggagtggatctaccgtctgaaaagcctggtc

SEQ ID NO: 39 - DNA, 1119 bp, Klebsiella pneumoniae
atgcgttacgtagatgaataccgcgcccccgaacaggtgatgcagctggtggcccatcttcagcagcgtgctcgtctgctgccgcataccgccgcgcgaccgctgcgcatcatggaggtctgcggcggccatacccatgccatttttaaattcgggctcgaccagctgttgccggagaacatcgaatttattcatggtcccggctgcccggtgtgcgtcctgccgatggggcgcatcgacgcctgcattgagattgccagccgcccgggagtgatcttctgcaccttcggcgacgccatgcgcgtgccgggtaaaaacggctcgcttctgcaggcgaaagcccgcggcgccgatgtccgcatcgtttactcgccgatggacgctctgcggctggcgcagcaaaatccgcagcgcgaggtggtcttttttggtcttggtttcgaaaccaccatgcccgctaccgccctgaccctgcgtcaggcgcgagagcgcaacgtcgataacttctactttttctgccagcacatcaccctgctgccgaccctgcgcagcctgctggaccagccggagaacggaatcgacgcctttctcgccccgggccacgtcagtatggtgatcggcaccgaggcctacggctttatcgccagcgactatcaccgtcctttagtggtcgccggtttcgaaccgcttgatctactgcaaggcgcggtgatgctggttgagcagacaatagcgcagcgcagcgatgtggaaaatcagtaccgtcgcgtggtgccggatgagggcaacccgctggcgcaggcggcgatggccgacgtcttccgcctggatggcgacagcgaatggcgcggcctgggggtcatcagcgactccggcgtgcagcttacgccagcctatcagcgcttcgatgccgaggcgcattttcgcccggcgccgcagcgcgtgtgcgacgacccgcgcgcccgctgcggcgaggtgctgaccggccgctgtaaaccgcaccagtgcccgctcttcgccagcacctgcaatccgcaaagcgcctttggcgcgctaatggtctcctctgaaggggcctgcgccgcctggtatcaatatcgcagtcaggaaaatgaagta

SEQ ID NO: 40 - DNA, 1218 bp, Klebsiella pneumoniae
atgacattttcagtagaacaggttcgcgccgattttccggtactgaaccgggaggtcaacggtcagccgctggtctatctcgacagcgccgccagcgcccagaagccggaggcagtgatcggcgccgaagcggaattctatcgccacggctacgcggcggtgcatcgtggcatccataccctcagcgcggaagccaccgcgcggatggaagccgtgcgtcagcaggcggccaccttccttaacgccgggtcggcggaggaagtggtgttcgtccgcggcaccaccgagggtatcaacctggtggccaacagctggggaaacgccaacgtcggcgccggggataacatcatcatcagcgaaatggagcaccacgccaatattgtgccgtggcagatgctgtgcgcccgcgtcggggctgagctgcgggtgatccccctgaacccggacggtacgctgcaactggatgttgtcccgggactgtttgacccgcgcacccgcctgctggcgataaccgaggtctccaacgtgctggggacggaaaacccgctggcggcgctgattgctcttgcgcatcagcatggcgcgaaagtgctggtggatggcgcccaggcggtgatgcaccacccggtggacgtccaggcgctgggctgcgatttttatgttttctccgcccacaagctgtacgggccgaccgggatcggcgtgctctacgcccggtccgagctgctgcagacgatggcgccttgggaagggggcgggtcgatgatcgccaccgtcagcctgacggagggcaccacctggaatcaggcgccgtggcgctttgaggccggcacgccgaataccggggggatcatcggcctcggcgcggcgctgacctacgtcagccagctgggactgacgcagattgccgagtatgagcagacgctgatgcgctacgcgctcgatgccctgcgcgcggtaccggatctgatcctttacggcccggcgcagcgtaaaggggtaattgctttcaacctcggtcagcatcacgcctatgacgtcggcagcttcctcgataactacgggatcgccgtgcggaccggacaccactgcgcgatgccgttgatggcccggtatcaggtaccggctatgtgtcgggcatcgctggcgatgtacaataccacggaagaggtggaccgcctggtggccggcctccagcggatccgcaaactgttaggg

SEQ ID NO: 41 - DNA, 1011 bp, Klebsiella pneumoniae
atggcgccatcccgcacattattggcccattcatccaccactggacgcatgcctgaggttcttctcgtgcctgatatgaagctttttgctggtaacgccaccccggaactagcacaacgtattgccaaccgcctgtacacttctcttggcgacgccgctgtaggtcgttttagcgacggcgaagtcagcgtacaaatcaatgaaaacgtacgcggtggtgatattttcatcatccagtccacttgtgctcccaccaatgacaacctgatggaactggttgttatggttgatgctctgcgtcgtgcttcggcaggtcgtatcaccgccgttatcccttacttcggttatgctcgtcaggaccgtcgtgttcgttctgctcgtgtgccaatcaccgcgaaagtggtggcggattttctgtccagcgtcggcgttgaccgcgtgctgaccgttgacctgcacgcagaacagatccagggcttcttcgatgtgccagtcgataacgtgttcggcagcccaatcctgctggaagatatgctgcagctgaacctggacaacccgattgtggtttctccggacatcggcggcgtcgtgcgtgcccgcgctatcgctaaactgctgaatgataccgatatggctatcatcgacaagcgccgtccgcgcgccaacgtctcccaggtgatgcacatcatcggcgacgttgccggtcgtgactgcgtgatggtcgacgatatgatcgacaccggcggcaccctgtgtaaagcggcagaagcgctgaaagagcgtggcgcgaaacgcgtattcgcttacgcgacgcacccaatcttctccggcaacgctatccagaacatcaaaaactctgtcattgatgaatttgtcgtctgcgataccattccgctggcaccagaaattaaagcgctggataaagtgcgtactctgacgctctccggtatgctggctgaagctattcgccgtatcagcaatgaagaatctatctctgctatgttcgaacat

SEQ ID NO: 42 - DNA, 744 bp, Klebsiella pneumoniae
atgagcgcaatgacccttgatttacctcgccgctttccgtggccaacgctgctgtccgtggctatccacggtgccgttgtggcggggctgctttatacctcggtacatcaggttattgaacagccttctccgacgcagccgatagagatcacaatggtggcgccggccgatcttgagccgcctccggcggcgcagcctgtcgtggagcccgttgttgaacccgaacctgagccggagccagaggtagtgcctgaaccgccgaaagaggcgccggtggtgatccataaaccggaacctaagccgaagcccaaacctaaacccaagcctaagccggagaaaaaggttgaacagccgaagcgggaagtgaagccggcagcagagccgcgtccggcctcgccgtttgaaaacaacaatacggcgccggcgcgtacagcgccaagtacctcgaccgcagcggctaaacccaccgttactgctccgagcggcccgcgggcgatcagccgcgttcagccgtcctatccgccgcgcgctcaggcgctgcgcattgaagggacggtacgggtgaagtttgacgtttcgcctgatggccgcattgataatctgcagatcctctctgctcagccggcgaatatgttcgaacgcgaggtgaaaagcgcgatgcgcagatggcgttatgagcagggaagaccgggtaccggcgtaacgatgaccatcaaattccgcctgaacggcgtcgagattaac

SEQ ID NO: 43 - DNA, 663 bp, Klebsiella pneumoniae
atgactcaaccagaagcagtattttttgactgtgacggcacgctggtcgacagcgaggtgatttgctcccgcgcctacgttcacatgtttcaggaattcggcattacgctggacctcgccgagatttttaagcgcttcaaaggtgtgaagctgtacgaaattatcgacaccatcaacgctgagtatggcgttaatctgcaaaaggccaccctggagccgatttaccgggcggaggtcgctcgcctgttcgatagcgagctggaggtgattcccggagcccaggcgctgctggatgcggtaagcgtcccgatgtgcgtggtttccaatggcccagtcagtaagatgcagcactcgctcggacgcaccggcctgctgcgccatttcactgaccgcttgtacagcggctacgatattcagcgctggaagcccgacccggcgctgatgtttcatgcggcagaggccatgcaggtaaaagccgaaaactgtattctggtggatgactccagcgccggcgctcagtcggggattgccgccggcatggaagtgttttatttctgcgccgatccgcacaaccagccgatcgatcatcccaaagtgacgacctttaccgatctggcagagctgccggcattgtggcaggcgcgcggctgggatatcacgcgt

SEQ ID NO: 44 - DNA, 1140 bp, Klebsiella pneumoniae
gtgcgccggctgcgtgaacgcggcgcggaagtgcgtgtcgcgatgacggaggcggcaaaagcgttcatcaccccactcagcctgcaggcggtatccggctatccggtttccgacagcctgctcgatccggcggcggaagcggcaatgggccatattgagctcggtaaatgggccgacctggtgatcctcgccccagcgaccgccgatttaatcgctcgcgtggcggccggcatggccaacgatctggtgtcgacgatctgtcttgccactccatccccggttgccgtggtgcccgccatgaaccagcagatgtatcgcgcgcaggccacccagcataatctgcagacgctcgctactcgcgggctgctgctatggggaccagacagcggtagccaggcctgcggcgacgtcggcccggggagaatgctcgatccgctaactatcgtagacatggccgcgcagcatttcgcctcccctgtcaaagatttgcaacatctcaacctcatgattaccgcgggcccgacccgtgagccattggatccggtgcgttatatcaccaaccacagctctggcaagatgggcttcgcgattgccgccgccgcagcgcagcggggcgcgaatgtgaccttgatcagcgggccggtatcgctaccgaccccgccgtttgtgcagcgcattgatgtcactaccgcgctggagatggaagcggccgtccaggctggcgcccagcagcagcacatttttattggctgcgccgcggtagcggattaccgcgccgccgtcatcgccgaagataaaataaaaaaacaaggtgatgaattaacaataaaaatggttaaaaacccggatatcgtggccggggtcgcggcgctaaaatcacatcgcccctacgtcgttgggtttgccgccgaaacgaataatgtggaagaatatgcgcggcaaaaacgtgcccgcaagaacctcgacctgatttgcgccaacgatgtttcccagcctaatcagggctttaacagcgacagcaacgcactacaccttttctggcaggatggggaaaagcgcttaccacttgagcgcaaggaactcctgggccaattattactcgacgagatcgtgacccgttatgatgaaaaaaatcgacgt

SEQ ID NO: 45 - DNA, 1362 bp, Klebsiella pneumoniae
atgtttcgtttaagttttatgtttatcgcgctcctgaccgcgggctgcgtctcgcttgacccgcattatgatcgcccggccgcgccggtgccggccaccctgcccggggcgcacggcgaatcgacggcggtggtcggcgactggcagaaagtggtcaatgacgcgcggctgaaaaaagtggtcagcatcgcgctgaacagcaaccgcgatgtgcaaaaggcgctagccgatatcgaggccgcgcgcgcccagtatggcgaaacgcgggcatcgctgtttcccaccgttgatgccgaactgagccacacccgcagcaaaacggtggccagcggcctgagctccgcttcacaggccgacggcgcggtctccagcttcgaactggacttgttcggcaagaaccagagcctgtcgcgcgcggcgcgcgaaacctggcttgccagcgaattcaccgcgcagaatacccggctgacgatgattgccgatttgaccaccgcctgggtgacgctggcgacggataacagcaatctggcgctggcgcagcagacgatggacagcgcggcaaactcgcgcaacatcgtcgcccaccagatggcggttggcaccgcctccgcgggtgatttaagctcggcggaaagcgtctatcagcaggcgcgcgccagcgtcgccagctatcgcacgctggtggcgcaggataaaaacgccattaacctgctggcgggggaaaccgtgccggagagcctgctgcccggcactctcgagagtctcggggataacagcatcgcgctggtgccggcgggcgtgtcgtcgtcggtgctgctgcgtcggccggacattcaggaagcggagcacaatctgaagagcgccaatgccgatatcggcgcggcgcgggcgaacttcttcccgtcgatttccctgaccgccagcgccggggtcggcagcgactcgctgtcgtcgctattcagccacgggatgcaggtgtggtcgttcgccccctccatcagcctgccgctgttcaccggcggcagcaacctggcgcagctacgctatgcggaagcggagaaaaaggggctgatcgccacctacgagaaatcgattcagagcgcgtttaaggacgttgccgatgcgctggcgcgccgggaaacgctgagcgaagagcttgatgctcagcggcagtatgtcgccgccgagcagacatcgctggatatcgccatgaagagctatcaggccggggtcggcgattatctgtcggtgctcaccgctcagcgcacgctgtggtcggcgaaaacgacgctgctgtccctgcagcagaccgacctcaataaccggatcaccctctggcagtcgctgggcggcggcgccagt

SEQ ID NO: 46 - DNA, 1539 bp, Klebsiella pneumoniae
atgcaactgaattccaccgaaatcagcgaactgatcaagcagcgcattgctcagttcaatgttgtgagcgaagctcataacgaaggtactattgtttctgtaagtgacggtgttatccgcatccacggccttgccgaatgtatgcagggcgagatgatctccctgccgggtaaccgttacgctatcgcactgaacctggagcgcgactccgtaggtgcggtggtaatgggtccgtacgctgacctcgccgaaggcatgaaggtgaaatgtactggccgtatcctggaagttccggtaggccgtggcctgctgggccgcgtggttaacaccctgggcgcgccaattgatggtaaaggtccgctggaaaacgacggtttctccgccgttgaagcgatcgcgccgggcgtaatcgaacgtcagtccgtcgatcagccggtacagaccggttacaaatccgttgacgccatgatcccaatcggtcgtggtcagcgtgaactgatcatcggcgaccgtcagaccggtaaaactgcgctggctatcgatgccatcatcaaccagcgtgattccggcatcaagtgcgtctatgtcgctatcggtcagaaagcgtccaccatctctaacgtggtgcgtaaactggaagagcacggcgcgctggctaacaccatcgtagtggtagcgactgcatctgaatctgctgcactgcaatacctggcgccatacgctggttgcgcaatgggcgaatacttccgcgaccgcggtgaagatgcgctgatcgtttacgatgatctgtctaaacaggctgttgcttatcgccagatctccctgctgctccgtcgtccgcctggacgtgaagcgttcccgggcgacgtattctacctccactctcgtctgctggagcgtgctgcgcgtgttaacgccgaatacgttgaagccttcaccaaaggtgaagtgaaagggaaaaccggttctctgaccgcgctgccgattatcgaaacgcaggcgggtgacgtttccgcattcgttccgaccaacgtaatctctattaccgatggtcagatcttcctggaaaccaacctgtttaacgccggtattcgtcctgcggttaacccgggtatctccgtatcccgtgttggtggtgcagcgcagaccaagatcatgaagaaactgtccggtggtatccgtaccgcgctggcgcagtatcgtgaactggcggcgttctcccagtttgcatccgaccttgacgatgcaacccgcaaacagctggaccacggtcagaaagtgaccgagctgctgaaacagaaacagtatgcgccgatgtccgtcgcgcagcagtctctggttctgttcgcagcagaacgtggttacctggctgatgtagaactggcgaaaatcggtagcttcgaagccgctctgctggcttacgtcgaccgtgatcacgctccgctgatgcaagagattaaccagtccggtggctataacgacgaaatcgaaggcaagctgaaaggcatcctcgattccttcaaagcaacccagtcctgg

SEQ ID NO: 47 - DNA, 2469 bp, Klebsiella pneumoniae
atggagcatgcccacccacaggtagacgcgaatcgcgtcatagctgccgatcggcggcttttcggttttcagctgccagcctttccctttctcatagcgcacccagtccggggtaaagcctttcggcgcggtctccagcagcaggcgcaggttactgtcgcgcagagcgggccacggcgcgccaaaacgcacaaagtaggtggccagctgcggcggaagatagctggggttaaaccgccagcctctgtcatcggcaaaaccgacttttcccggcagcagcatcgtgccgaggcccggcaccgccaccgtctcttcagcgacaatccgcgccagcagggctttaccggtctcggtgtactgcggctgttgccacaggcgccccgcctccagcagcgcccaggctatccacagatccgagtcggacgccgagttgctgtccagcagggtccactgctcatcgtcctttttgccccacagccagcccggcaaatgttgtttcagatcgccttccgccaggttgttctgcgtccaggtcagcagtttgtcgaaccctgcgcgatcgttggccgccagggcgaaaaacaggccatagctctgcccttcggaggtggagattttgcgcgcatcgctggggtcaatcacccgtccctcggggctgacgtacgcttgtttaaactgctcccaggcgggccactggcaggcggcgcccacctggcccgccgccagcagcagcgccgagagcaccgcgccacaaagtactttcatcatggtttactcatcatccaggctaagacggcggcggctgatgatgcgcagcatgcgccacagcacccatgccagcagcacaatgctgatggcggcgaagatcgccagcagtatcgggtggttagagagcgcgaaccagatgcgctcgaaccagggcagatgacccacgtagtaaatatcccccacccgcagactgttgacgccggattcgcggatcaccgccaccgagccaaacatcgctgcccgcttaccgctgtcgttgagggcgttggtcagcagttcatttccgcgcgggctgtcggccagcagggccaccacgctgcgctgatcgttatacggcgactggaagccaatcaccgccgccatcggcccggaagaggtaatgtcggtgcgggtattgggcgtgcgggcctcatcgtcgggataaatgctcgccaggtcatagtggcgcatcggcattttcacccagcttttggtcgcctcgaccagcaggttgattttggtgtcgtccttgagcgacgacgggatcgcgccgatcagcagcagatccgcatctttgttcttgatctggttgccatcgtcggtcatttgcagattaatcgccgccagaccggtctgcgaaccgatgccccccagcgcctgcagcagcgtcgccacctggccctgggtcggcgccttcggcaccaccaccagcgtgtcggaaaggtccgccatacggctgtaagggaagcccgcattggcgaagacgcgcaggtccggcaaggcgataaagtgataatacttcgagaagtcgatggtcgaatcgtcgccgatcaccacgtggttctgcaccggctggaaggtaatacagttgtcgatggagccgccgggcatcgggttcatatactggaagtcaaagcgcagctggttgaccgccccaagacgcagcgcggggatggtgacctccgatttgccgtccagcagcccctgcagcaccggcaggcgcaggatcagtttgttcacgtcctgggagctgttaaggctgaacgactgcaggaactggtcgttgaggctgatatccatccgcgagctgtccttcaccggcggcatggtgtagcggtatttcagatccatatcgatgccgttggcccgcagcagatagagatccggcggcaggttaagcgccacggtgatggcatccggcaccaggccgctggactgcagctgttgctcataggttttcagctcagcaaaggtgaccgaacggtcggtgcgcacccagttcggcgcgtcgtaaggctgacgcggctgcagggttttgatgccgtccacggtgacgctgctgccgcggaacagaatattgccctgagcaatccccttcgccgccagcagcaggtcgttatcatcgcggccgaaaatcaccagcagcttgacgtagggatcgttcgggttgtcgatcatttcgatggtcggcgccttgaccggcggatgatcgcgcaggaagtccggacgcttgtcgttggtggcgaagacaatggcgttacgatccggcagttcattgaaatagaccgggaactgctggccgcgccagccggccttgctgccgaaccaggaggcgactatcgccgccgcctgctgctgggtgaccgctggcgagcccgggaaaatcatcggcagcttcagcgggcggttatcgcgcggatcgtagaacggcaccgggaagtg

SEQ ID NO: 48 - DNA, 1191 bp, Klebsiella pneumoniae
gtggaaaggtttgatgccattgtcgttggcgccggagcggcgggtatgttttgcgcagcgcaggcgggccagctcggctgccgcgtcctgctgctggataacggcaaaaagccggggcgaaaaattctgatgtccggcggcggccgctgcaactttaccaacatgtatgttgaaccgacggcctatttgagccaaaacccgcatttttgcaaatctgccctggcgcgctacacccagtgggactttatcgagctggtcggcaaatatggcatcgcctggcatgagaagaccctcggccagctgttttgcgatgattcggcggagcagatcgtcaatctgctgctcgcggaatgtgaaaagggcggcgtgcagatccgtctgcgcagcgaaatcctcagcgtggagcgcgatgaacaaggctaccggctacaggtgaacggcgaaacgctgatgaccaaaaagctggtgatcgcctccggcggtctgtcgatgccggggctcggcgcctcgccgtttggctataaagtcgccgagcagttcggcctgaaggtgctgccgacccgcgcggggctggtgccgtttaccctccacaagccattgcttgagcagctgcaggtcctctccggcgtgtcggtgccgtcgaccattaccgccgagaacggcactctgtttcgcgaaaatctgctgttcacccaccgcggcctttccggaccggcggtgctgcaaatttccagctactggcagcccggcgagttcgtcaccgttaatctgctaccggactgcgatcttgatgacttccttaacgagcagcgcagcgcgcatcccaaccagagcctgaagaacaccctggcgatgcagctgccgaagcggctggtggagtgtctgcagcagctggggcagatacctgatgtgacgctcaagcaactgaacgttcgcgatcagcagacgctggtggagacgttaaccgcctggcgcgtgcagccgaacggcaccgaaggctaccggacggcggaggtgaccctcggcggcgtggacaccaacgaactctcgtcgcgtactatggaggcgcgtaaggcgccgggtctctactttatcggcgaagtgatggacgttaccggctggctcggggggtataacttccagtgggcgtggtcaagcgcctgggcctgcgcgcaggcgctggtggaaggg

SEQ ID NO: 49 - DNA, 675 bp, Klebsiella pneumoniae
atgaagcagtatttgattgccccttcgattctgtcggctgattttgcccgtctgggtgaggataccgcgaaggcgctggcggcgggtgcggatgtcgtgcacttcgacgttatggacaaccactacgtgccaaacctgacgattggcccgatggtgctgaagtcactgcgtaattacggtattaccgcgccaatcgacgttcacctgatggtgaagccggtcgaccgcatcattcctgattttgccgaagccggcgccagcattatcaccttccatccggaagcctccgaacacgtcgatcgcagcctgcagcttatcaaagagcacggctgtaaagcgggcctggtgtttaacccggcgacgccgctgagctacctcgattacgtgatggataagctggacgtgatcctgctgatgtcggttaacccgggctttggcggccagtcctttattccccagacgctggataaactgcgtgaagtgcgccagcgcatcgatgcgtccggctacgacatccgcctggaagtggatggcggcgtgaaagccagcaatatcggcgaaatcgccgcggcgggtgcggatatgtttgttgccggttcggcgatcttcggtcagccggactacaagcaagtcattgatcaaatgcgtagtgaattagcgaaggtgagtcatgga

SEQ ID NO: 50 - DNA, 2502 bp, Klebsiella pneumoniae
gtggaaaacccgtcgcagccagcgcaatcgggcaacagtggcgaaaacggcgcaggaggatgggacgttatgaagcgattaaccacgctggcgctgctggcagggatgctctctgcgcctgcgctacacagtgaagaaccgggctccggcgccgctgccccgctgagcttcccgcagctcaacgacgcggcggacagcgagcccggcgacgaacctccggctgcctcgccggaggagggcgcctctccggcagcccccgccaccgccggcgatgcggcggcgacggcccctgcgccggttatgccggacttacccccgccggtgagcggcacggccgcgccggaggtcattcctgtcgctccggtctggggaggcgatctgaatctggcgcagatggggatgccggacgggattatcctcagcggcggccagcgacagggtggggtcagctttaccctgcctgccgatcaggtggtgatccattcgcagctcagccttgccgttcgcgtatcgccggagatggcgagccgcaacgccaccctgcagctgatgctcaacggtcaaccgctcggcacgctgccgctgggcgccgatggcgaggatgtctcccattatcagctggatattccgcccgcgctgatggtctccagcaataacctgagcgtgaagatcaacgatggcgataccctgcagtgccagcgtgacattcatgatacgtcgcgggtgacggtgctgcccacgtcgcatttcagctgggaaagccagcagctgaacatcagcgacgacctgagccacttcccgcggcccttctttgacagcatgcagatgaccccggcggacattgcggtcgcctatggggccaagccgtcggcggacgtcttcagcgccgcggcgctgatctcctcctggctgggtatccaggcggactatcgcggcattgccttcagcgctctgcgcgaccgtctgccggaacgccacggcatcgtgattggccatccgggggagcaggtgggcggcatgatgctgccggaaaccgataagccgctgctgcgcatcatcgccaaccccgccaatccggcctataaactgctgctgattgtcggtaaaaacgatacggcgctgcgcatggccgcctggcggttaacccgcggcaactttgcgccgcaaaccgcgacgctggatgtcgaaccgcagaccatcccggttggcaaagcatatgatgccccgcgctggatccccaccgatcgtccggtcaagctcagcgagctgctgcgtaaggaccaaagcccgaccgtcagcggcgtctggcacgaacctttacgtatcgccttccgcgccgcgcccgatctctatctgtgggatggggagaccattccgctacaggttggctaccgcttcccgtcggaaagctggattaatgaggacaagtccttgctgagcgtcacgctcaatggcaccttcctcaacaacctgccgatgaacaagcaggggccgctggagaaagtctggcgctacctcgggggcgatgcgcgccaggagcgctttaccatcccgctggcgccttacctgatttacggcgataaccagctgtcgatgtacttcaatgtggtgccaaaggacgatgttccgtgttcggtgctgctgaataacaatatcaagagccggatcactgacgactcctggatcgatttgagcaagacgcgtcacttctcgctgttgcccaatctctcctactttgtcggcgcctcgttccccttctcgcggctggcggactattcgcagacgaccctcctgctgccggcggacccgtctgaaacccaggtggcgaccctgctgaatctggcggcacgctccgggaacgcgaccggcaccgcgctggcgaataaccgcgtcgtgctcgggatgcccaccggcgggggggatttgcagtcgctgcgtgaacgtgacgtgctggcggtcaccgctctcgatcagcaggcctttaaccagagcctgctggccgactcaccctatcgcccggtagataatgtgctgagcgtccgcgagccagacctgtggcaaaaagtccagcgccggctcaccggcgactggacttccgccagcctcgacgccgatcgctacttttcgtcgagcagcgcctggcgcgggttcatcagctatcgctcgccgtggaattccacccgcctggtggtggtggcgctggccagcaatgatgaccagctggcgcgactgaagaccgatctggaatcgccgcgcattaacgccgggatccgcggcgataccgcggtgatcaccagcgataacggggtgcgcagcttccaggtgagtacgccgttccccagcggtcagatgccgtggtacatgatggcggtctggtatgccagccagcactcaggtttcctggcggtgctggggctgattgccacctcgataatgggactggcgctgaccgcgatgtttaaacgtcacgcccgtaagcgtctgggttcgggggataaccaa

SEQ ID NO: 51 - DNA, 411 bp, Klebsiella pneumoniae
atgaggccctggtgtacgtcgaaagcgaagtcgaaaacggcttaccgccggtgccggctaactggcaattgtatcgtgaaaaagtggccggacaggtcgcctaccgtctttaccaacgtgaggcccaaggagagcaccatgctgattaatttaggccgcctgctgatgctgtgcgtctgggcctttctgttattgaatctgtttcagcccttcccgaagccgctgaatatctttgtcaacgtcgcgctgattttcatgatcctgatgcacggtctgcagctgacgctgctcaaggcgacgcagccgaaagaggcgccgccgctgagccgctttgagcaaatccgcatttttattttcggcgtgtttgagctcgtggcctggcagaaaaaactgaaggcgacgctgaaaaaa

SEQ ID NO: 52 - DNA, 501 bp, Klebsiella pneumoniae
atggctcacatcgaaaaacaagctggcgaactgcaggaaaagctgatcgcggtaaaccgcgtatctaaaaccgttaaaggtggtcgtattttctccttcacagctctgactgtagtaggcgatggtaacggtcgcgttggttttggttacggtaaagcgcgtgaagttccagcagcgatccagaaagcgatggaaaaagcccgtcgcaatatgattaacgtcgcgctgaaccacggcaccctgcagcacccggttaagggtactcacacgggttctcgtgtattcatgcagccggcttccgaaggtaccggtatcatcgccggtggtgcaatgcgcgccgttctggaagtcgctggggttcgtaacgttctggctaaagcgtatggttccactaacccgattaacgtggttcgtgcaactatcgacggtctggaaaacatgaagtccccggatatggtcgctgccaagcgtggtaaatccgttgaagaaattctggggaaa

SEQ ID NO: 53 - DNA, 2541 bp, Klebsiella pneumoniae
atgagcaaagtcagaatcgctattatcggtaacggcatggttggccatcgctttatcgaagagcttctcgataaggcgcctgccggacagttcgacattaccgtgttctgtgaagaaccgcgtatcgcctacgaccgcgtccacctgtcgtcttatttctcccatcacactgcggaagaactgtcgctggtacgcgaaggtttctatgagaaacacggcgtcaaggtgctggtcggcgaacgggcgatcaccatcaaccgccaggagaaagtgatccactccagcgccgggcgtaccgtgttctacgacaagctgattatggcgaccggttcatacccgtggatcccgccgattaaaggcgcggaaacccaggattgcttcgtctatcgcactattgaagatcttaacgccatcgaatcctgcgcccgccgcagcaaacgcggcgcggtagtcggcggcggcctgctcggcctggaagcggccggagcgttgaaaaacctcggcgtggaaacccatgttatcgaattcgcgccgatgctgatggccgaacagctcgaccagatgggcggcgagcagttgcggcgcaaaatcgaaagcatgggcgtgaaagttcacaccagcaaaaacaccaaagagattgttcagcagggcaccgaggcgcgcaaaaccatgcacttcgccgacggtagcgagctgcaggtcgatttcatcgtcttctcaaccgggatccgcccgcgcgataagctggccacccagtgcgggctggcggtcgcccagcgcggcggcatcatggtcaacgatagctgccagacctccgatccggatatctatgccatcggggaatgcgccagctggaacaaccgcgtctacggtctggtcgcccccggctataaaatggcccaggtggccgtcgaccatctcctcggcagtgaaaatagcttcaccggcgccgacctcagcgccaagctgaagctgttgggtgtggacgtgggcgggatcggcgatgcccacggccgcacgccgggcgcccgtagctacgtctatctcgacgaaagcaaagaagtttataagcgcctgatcgtcagcgccgacaacaaaacgctgctcggcgcggtactggtcggcgacaccagcgactacggcaatctgctgcagctggtgctcaacgccatcgagctgccggaaaacccggattcgctgatcctcccggcccacgccggcagcggcaagccatcgatcggcgtggataaactgccggacagcgcgcagatctgctcctgctttgacgtcagcaaaggcgacctgatcgccgctatcaacaaaggctgccacaccgtggcggcgctgaaagcggaaaccaaagccgggaccggctgcgggggctgtattccgctggtcactcaggtgctcaacgccgagctggcgaaacagggcattgaggtcaacaacaatctgtgcgaacacttcgcttactcccgtcaggagctgttccacctgatccgcgtggaaggcatcaaaaccttcgacgagctgctggaaaaacacggtcagggctacggctgtgaagtctgtaagccgaccgtcggttccctgctggcctcctgctggaatgagtacatcctcaagccgcagcacacgccgctgcaggacagcaacgacaacttcctcgccaacattcagaaagatggtacctattcggtgatcccgcgctcagctggcggcgaaatcacgccggaagggctggtcgccgtgggccgtatcgcgcgtgaattcaatctgtacaccaaaatcaccggctctcagcgcatcggcctgtttggcgcgcagaaagacgacctgccggagatctggcggcagctgattgaagcgggattcgaaaccggccacgcctacgccaaagcgctgcgaatggcgaaaacctgcgtcggcagcacctggtgccgctacggcgttggcgacagcgtcggcttcggcgtggaactggaaaaccgctacaaaggcatccgcaccccgcacaaaatgaagttcggcgtctccggctgcacccgcgaatgtgccgaggctcagggcaaagacgtcgggatcatcgccaccgagaaaggctggaacctgtacgtttgcggtaacggcgggatgaaaccgcgccacgccgatctactggccgcggacctcgatcgcgagacgctcatcaaatatctcgaccgctttatgatgttctacatccgcaccgccgataagctgacccgcactgccccgtggctggacaatatggaaggcggtatcgactatctgcgcagcgtcatcatcgatgacaagctcggtctgaacgaccatctggaagaagaactggctcgcctgcgcgccgccttcgcctgcgagtggaccgagaccgtcaacaacccggcggcgcagacccgcttcaaacactttatcaacagcgaccagcgcgacccgaacgttcaggtggtgccggaacgtgaccagcaccgcccggccacgccgtatgagcgtatcccggttactctggtggaggaaaaagca

SEQ ID NO: 54 - DNA, 4989 bp, Klebsiella pneumoniae
gtgacaaattgcatcaggctcatcggccgaggggttagaaggatgaaaccatttcgtttagcggcgctatcactagcgctccttaccgcattttcattaaccgggtgtgatgacagcggtacaccgcaggcctcggccccggcgccagccgcggatagcaacccaggcgcgacggcaaaaccggaccgcgcccagctggcggcgctggcggaaaaaagccagggtaaagcgctgacgctcctcgacgcctcggaggtgcaactggatggcgccgcgaccctggtgctgacgttttccgtcccgctgcagccggaccaggatttctcccgcagcgtgcatctggtcgacaagaaaagcggtaaggtggacggtgcctgggagctggcgccgaatctgaaagagctgcgtctgcgtcaccttgagccaaagcgcgagctgattgtctcggtcgacccgacgctgaccgccctgaacaaggcgacgctcgacaaaccgtttgagaagaccctgaccacccgcgatatcgcaccgagcgttgggtttgccagccgcggctcgctgctgccgggcaacgtggtcgccgggctgccggtgatggcgctgaacgtcgataatgtcgacgttaatttcttccgcattaagccggaatcgctctccgcctttgtcagtcagtgggaataccgtaactcgttaagcaactgggaatctgatgaactgctgaagatggcggatctggtctacagcggccgcttcgatctcaacccggcgcgtaatactcgcgaaaagctgctgctgccgctgagcgacatcaagccgctccagcagcctggcgtctacgtggcggtcatgaacccggcgggccgttatagctacagcaacgcggcgacgctgtttaccctcagcgatatcggcgtctcggcgcatcgctaccataaccggctggacgtttttacccagagtctggaaaacggcgccgcccagtcgggcattgaggtgcagttgctcaatgccaaagggcagaccctggcggaagcgaaaagcgacagccagggccacgtcaccctgcaaaccgataaagaagccgcgctgctgctggcgcgcaaagaggggcagaccacgctgctcgacctcaagctgccggcgctggatctggcggaattctctatcgcaggcgcgcccggctttagcaaacagttctttatgtttggcccgcgcgatctctatcgtcccggcgaaacggtgatccttaatgcgctgttgcgcgatagcgacggcaagccgctggcggagcagccggtgaaactcgaggtggttcagccggacggccaggtgatccgctcggtgatgagcaaaccagtgaatggcctgtaccagtttacttatccgctcgacagcggcgcggctaccggcatgtggcacattcgcgccagcgccggcgacaatcagccgcgcgaatgggatttccacgttgaagactttatgccggaacgcatggccctgaacctgacgccgcaggccgcgccagtcgcgccggatgccgacgtcacctttggcgttagcggcgcttatctctacggcgcgccggccagcggcaaccagctgcagggcaagctgttcctgcgcccgctgcgcgacgccgtcgctgcgctgccgggcttccagttcggcgatattgcggaagaaaacctctcccgtagtctggatgaagtccagctgacgctggacgaaaaaggccatggcgaagtgaccacctcaagccagtggcaggatagccattcgccgctgcaggtggtgttgcaggccagcctgctggaatccggcggtcgcccggtgacccgtacggttaagcagccgatctggcccgccgaggcgctgccggggatccgcccgcaatttacgctgaaggacgtttacgattaccgcaccgataccaccgtcaaacagccggtggtggatgaaaacagtaacgccgcgtttgatatcgtctatgccgacgtcaaaggcgagaaaaaagcgatctccggtctccaggtgcggctgatccgcgagcggcgcgactactactggaactggtccgacagcgaaggttggcagtcgcagttcgatcaaaaagatctgcaggagggcgaggagtcgctggacctgcaggccggccagatcggcaaagtgagcttcccggtggagtggggatcctatcgcctggaggtgaaaggaccggacgacgtggtcagcagcgtgcgcttctgggcgggctacagctggcaggataacagcgaaggcgccggcgcggcgcgtcctgaccgggtcaccatgaagctggataaaccgagctataaaccgggcgacaccatcaggctgcacatcgccgccccggcggcgggtaaaggctacgcaatggtggaatccagcgaagggccgctgtggtggcaggaaattgacgtcccggcggaggggatggacctgtcgatcccggtggataaaacctggaatcgccacgacctctacctcagcacgctggtggttcgtcccggcgataaatcgcgctcggcaacgccgaaacgcgcggtgggcctgctgcatctgccgctgggcgatgaaaaccgtcgcctgacgctggcgctggaggccccggacaaaatgcgccccaaccagccgctgacggtgaaagtgaaagccagcgtcaaagagggcgaggcgccgaaacaggtcaatgtcctgctctcggcggtggatagcggggtactgaatatcaccgattacgctaccccggatccgtggaacgccttctttggccagaagcgttacggcgcagatatctatgacatctacggccaggtgatcgaagggcaggggcgggtggccagcctgcgcttcggcggcgatggcgacgagttaaaacgcggcggcaaaccgccggtcaaccacgtgacgatcgtcgcccagcaggcgcagccggtggtattgaacgatcagggcgaaggcacggtgacgttacccattggcgattttaacggcgagctgcgggtgatggcccaggcgtggacggcggatgacttcggcagcagcgaagataaagtggtggtggccgccccggtcatcgccgaactgaacaccccgcgcttcctcgccagcggcgataccacacggctggcgctggatctcagcaatctgaccgataaaccgcaaaccctgcaggttcatcttaccgccagcgggctggtgaccttgaccgagggtcaactgccgccggtgcaactggcgccgggggcgcgcagcacgctgtttataccagtgagcgcgctggcgggcttcggcgatggtcaggttaatgccaccatcagcggcctgagcctgccgggcgaaaccttcgccccgctgcaaaaacagtggaaaatcggcgtgcgtccggcgtacccggcacagaccgtcaacagcggcgcagtgctgcagccaggtgaaagctggcagccgccggcggcgcagagccagggctttgccccgcaaacgctgcagggccaactgctgctcagcggtaaaccaccgttgaatctcgcccgctatatccgcgagctgaaagcctatccttacggctgccttgagcagaccgccagcggcctgttcccgtccctgtataccagcgcggcgcagctaaaggcgctgggcattagcggggacagcgacgaaaaacgccgcgcggccatcgatgtcggtatttcacgcctgctgcagatgcagctggaaaacggcggctttgcgctatgggatagagaggggccggaagagtactggctgaccgcctacgccatggacttcctcgtgcgcgccagcgagcagggctatagcgtaccggtcaacgccattaataaaggcaacgagcgcctactgcgctatctgcaggagccaggcctgatgaccgtgcgctacagcgacgacgcccaggctagccgctttgccgctcaggcatacgccgcgctggtgctggcgcgtcagcaaaaagcgccgctcggcgccttgcgtgaaatctggagccgtcacgaccaggcgcgatccggcttgccgctgctgcagctcggcattgcgctgaaaaccatgggcgatgcgccgcgcggcgacgccgccctgaagctggcggttgccaccccgcgccaggatgagaatcgttggctgggcgattacggtagcccgctgcgcgataacgccctgaagctggcgctgctggaagagaataaactgctgccggaggtgcaaaatcagctgttgagcacgctgtcggaagaggcctatggccagcgctggctgtcgacccaggaaaccaacgccttgttccttgccggacgtacgctggcggacctgccgggcagctggcaggcgaaaacctcgctgcaggcggagccgttggccggcgacaaagcgcaaacccgcaacctcgacggcgatcggctggcggcgctgcaggtgagtaataccggcagtcagccgctgtggctgcgtctcgacagcagcggctatccgcaaagcgcgccgcagccgggcggtaacgtcctggggattgaacgcactattttcgatacccaggggcagcagaaatcgctgtcttcactgcgcagcggcgaactggtgctcgtcaagctggaggtgaccgccaaacgcaacgtgcctgacgcgctggtggttgatctgttgccagccggtctggagctggaaaaccagaatctggccaacagcagcgccagcctgcaggagaatggcgacgcggtgcaaaacctgcttaaccagatgcagcaggcggatattcagcatatcgagttccgcgatgaccgctttgtcgccgccgtcgctgtcaatgaaggccagccggtgacgctggtctatctggcgcgggcggtgacgccgggcacttatcaggtcccgcagccgcaggtggaatcgatgtatgcgccgcagtggcgggcgacaggagcggccagcggtccgctcaccgtgacgccg

SEQ ID NO: 55 - DNA, 735 bp, Klebsiella pneumoniae; identical to SEQ ID NO: 8

SEQ ID NO: 56 - DNA, 651 bp, Klebsiella pneumoniae
gtgattaatttaaatggaaattcatcatcttctcgtcaggtaacctttattacccacccgtctattcaaagcaaagcctttgccagctatctgagcgaaaccctgatggcaccggtggttttacaaaatattaataaaccgctggcgcagcgtttggcaaaagattctgtaatattatttgatattgcagtgtcaaataagaaattaaacggggtgtggcgggatattattcgcctgcaggcagataatcctcgtttgttgattattaatagcgcacaaaagtatgagctatacgaaatggcgcagtggccggctttatatggcgtgttccgtcatgacgatgatgaatcgcgcttaattgagggcgttaaggccgtactgaacggcgagcagacggctgaattgagcgtgatgcacccggcgatgtacgctgcggaccatgcatcgactccagtagagaactcgccgctgaccgagcgggaatgcgagatcctcaacgaactgcgctgcggcgcaacgaacctggatatcgcccgcgcgctgtttatcagcgagaacacggtgcggacgcacctgtacaatgtgtttcgtaaactgagcgtgaaaaatcgcacccaggcggtgagctgggctaacgaacatctgcgccac

SEQ ID NO: 57 - DNA, 1152 bp, Klebsiella pneumoniae
atggcaaaacacctttttacgtctgagtccgtatcagaagggcatcctgacaaaattgctgaccaaatctccgatgccgtgctggatgcgatcctcgagcaggatccgaaagcgcgtgtcgcatgtgaaacctatgtcaaaaccggcatggtgctggtaggcggcgaaatcaccaccagcgcatgggttgatatcgaagagatcacccgcaacaccgtccgcgaaattggctacgtgcattccgatatgggctttgacgccaactcgtgcgccgtactgagcgccattggtaaacagtctccggacattaaccagggcgttgaccgtgccgatccgctggaacagggcgccggcgaccaggggctgatgtttggctacgccactaacgaaaccgacgtgctgatgccggcgccggtgacttacgctcaccgtctggtgcagcgtcaggctgaagtgcgtaaaaacggcaccctgccgtggctgcgcccggatgcgaaaagccaggtgaccttccagtatgacgacggcaaaatcgtcggcatcgacgcggtcgttctgtcgactcagcacgcggaagatatcgatcagaaatccctgcaggaagcagtgatggaagagatcatcaagccgattctgccgaccgaatggctcaacgcgtccaccaaattcttcatcaacccgaccggccgtttcgttattggcggcccgatgggcgactgcggtctgaccggtcgtaagatcatcgttgatacctacggcggcatggctcgccacggcggcggcgcgttctccggtaaagatccatctaaagttgaccgttccgcagcctacgcggcgcgctatgtggcgaagaacatcgttgccgcaggcctggccgatcgttgcgaaattcaggtttcctacgctatcggcgttgcagaaccgacgtccatcatggtggaaacctttggcaccgagaaagtgccttctgaacagctgaccctgctggtgcgcgagttcttcgacctgcgtccatacggtctgattcagatgctggatctgctgcacccgatctacaaagaaaccgcagcctacggtcactttggtcgcgaacatttcccatgggaaaaaaccgacaaagcggcgctgctgcgggaagcggccggtctgaaa

SEQ ID NO: 58 - DNA, 1470 bp, Klebsiella pneumoniae
atgccgaggaaattctgttccggtttggctttcgccatcgccaccagcgaggcgcccatcccgaagccaatttctaaggtgaccggcgcgtcacggccaaacagggcggcgaaatcgagcggcgcatcgttgaattcaacgcccatcaccggccaaatgttatccagcgcatgctgctgccctttcgtcaggcggccctggcgacggacgaagctacgaatacggcgcagcgggcgaccgttttcatcgaattccggagagatgacgtcgtttttcataaaagtttggtctgcttgtgaatgtgttcggaaaacgggcattatccaaagttactcggcggatgcaagggtttacagccactcgcccttatgctgcaatctgcccccctgtaatcgcgatcccggagccgtagctttgacttttctcgccacgcaattttcagcccaggttctggactggtacgacaaatacgggcgtaaaaccctgccctggcaaatcgccaagacgccctacaaagtatggctctccgaagtgatgttgcaacaaacccaggtgaccacggtaatcccctattttgaacgctttatggcgcgtttccccacggtggtggatctcgccaacgcgccgctggatgaagtgctgcatctgtggaccggtctgggctactacgcgcgggcgcgcaacttacataaagccgcgcagcaagtcgccacactgcacggcggggaattcccccggacctttgacgaagtggcggcgctgcccggcgtcgggcgctcaacggcgggggcgattttatccctttcgctcggtcagcattatccgattctcgacggcaacgtgaagcgcgtgctcgcccgctgctatgctgtcagcggctggccggggaaaaaagaggtggaaaaacggctgtgggacatcagcgaagaggtcaccccggcagagggcgtcgagcgcttcaaccaggcgatgatggatctcggggcaatggtttgtacccgctcgaagccgaagtgcgagctatgtccgctgagcaacggctgcgtggcctacgcgaaccattcatgggcggaatatccgggcaaaaaaccgaagcagaccctcccggaacgcaccggctacttcctgctgatgcagcacggcgacgaggtgtttctttcccagcgtccgccggtgggtctgtggggcgggttgttctgttttccgcagtttgcagacgaagcggagctacgcgagtggctggcgcagcgccagataaaggccgataatctgacgcaattaaccgcttttcgccacactttcagccatttccacctggatattgtgccgatgtggcttacagtgcactcatctggcgcatgcatggatgaaggcaacgcactctggtataacttagcgcagccgccgtcggtcggtctggcggcccccgtggagcgcttgttgcaacagctaaaagccggagcgccggta

SEQ ID NO: 59 - DNA, 294 bp, Klebsiella pneumoniae
gtgacttactggtctcccgtatctgcatgggatgtatggggtttggcaatccgtcaacgggtcagcatcgctggacgctggacgaaacagccagccgggacatcatccgccacgctctggaacagggcatcaatttttacgataccgccatcgcctatcagaacggctccagcgaacggtacgttggccgggcgctgcgggagatggcaaaacgcgaggaggtggtgctggccaccaagtttctgccacgaaccgccgcgcagattgccgaggggatcagcggaaaacaggcta

SEQ ID NO: 60 - DNA, 2109 bp, Klebsiella pneumoniae
atgtacatgacttgtcgcttgggttacattgttcacacttttttccggcgtagcccaaaacgcgctctcgtcaagtcgttaagggcatggccttcaacagtccgaactggagtcaaaatgtcctcacgtaaagagcttgctaacgctattcgtgcgctgagcatggacgctgtacagaaagccaaatccggccacccgggggccccgatgggtatggctgacattgccgaagtgctgtggcgtgatttcctgaaccataacccgaacaatccggcctgggctgaccgtgaccgttttgtgttgtcaaatggccatggttcgatgctgatttacagcctgctgcacctcactggctacgatctgccgattgaagagctgaaaaacttccgccagctgcactccaaaaccccgggtcacccggaagtcggctacaccgcaggcgtggaaaccaccaccggtccgctgggccagggtatcgctaacgcggtcgggatggctatcgccgagaaaaccctggcggcgcagttcaaccgtccgggacacgatatcgtcgaccactacacctacgccttcatgggcgacggctgcatgatggaaggcatttctcacgaagtgtgctccctggccggtaccctgaaactgggtaaactggtggcgttctatgatgacaacggcatctccatcgacggccacgttgaaggctggttcaccgacgacaccgccaaacgctttgaagcctacggctggcacgtggtgcgcggcgtggacggtcacgacgctgacgccatcaaacgcgcggtagaagaagcgcgggcggtcaccgacaaaccgtccctgctgatgtgtaaaaccatcatcggtttcggttcgccgaacaaagccggtacccacgactcccacggcgcgccgctgggcgacgccgaaatcgccctgacccgcgaagcgctgggctggaaacacgcgccgtttgacatcccgtctgacatctatgcccagtgggatgccaaagaagccggccaggcgaaagaagccgcatggaacgagaagtttgcggcttacgccaaagccttcccgcaggaagcagccgaattcacccgccgtatgaaaggcgagatgccgtctgacttcgacgcgaaagctaacgagttcatcgcgaagctgcaggccaacccggcgaaaatcgccagccgtaaagcctcgcagaacgccatcgaagccttcggcccgctgctgccggaattcctcggcggctccgcagatctcgcgccgtccaacctgaccctgtggtccggctctaagccgatcaacgaagacgctgccgggaactacatccactacggcgtgcgcgagttcggtatgaccgctatcgccaacggtatcgcgctgcacggcggcttcctgccgtacacctccaccttcctgatgttcgtggaatacgcgcgtaacgcggtacgtatggccgcgctgatgaaacagcgtcaggtgatggtctacacccacgactcgatcggtctgggcgaagacggcccgactcaccagccggtagagcaggtggcttccctgcgcgtgaccccgaacatgtccacctggcgtccgtgtgaccaggttgaatccgcgattgcgtggaaatatggcgtggagcgtcaggacggcccgaccgcgctgatcctctcccgtcagaacctggcgcagcaggagcgtaccgcagagcagctggcgaacgtggcccgcggcggttatgtgctgaaagagtgcaccggctcgcagccggagctgatcttcatcgccaccggttcagaagtggagctggcggttgccgcatgggacaaactgactgccgaaggcgtgaaggcgcgcgtggtttccatgccgtccaccgacgcgttcgacaagcaggatgcggcttatcgcgaatccgtactgccgaaagccgtgaccgcgcgcgttgccgtggaagcgggtatcgctgactactggttcaaatacgttggcctgaacggcgctatcgttggcatgaccaccttcggtgagtctgcgccggctgagcagctgttcgaggagttcggcttcaccgttgataacgtggtcgctaaagcgaaagcgctgctg

SEQ ID NO: 61 - DNA, 759 bp, Klebsiella pneumoniae
atgcccgttttccgaacacattcacaagcagaccaaacttttatgaaaaacgacgtcatctctccggaattcgatgaaaacggtcgcccgctgcgccgtattcgtagcttcgtccgtcgccagggccgcctgacgaaagggcagcagcatgcgctggataacatttggccggtgatgggcgttgaattcaacgatgcgccgctcgatttcgccgccctgtttggccgtgacgcgccggtcaccttagaaattggcttcgggatgggcgcctcgctggtggcgatggcgaaagccaaaccggaacagaatttcctcggcattgaagtacactccccgggcgttggcgcttgtctggcttctgcggaagaagaaggcgtacaaaacctgcgcgtaatgtgtcacgatgcggtggaagtgctgcataccatgatcccggataactcgctgaatatggtgcaactgtttttccctgatccgtggcataaagcgcgtcataataaacgtcgtatcgtgcagccgcctttcgctgagctggtgaaaagcaagttgaagctcggcggcgtcttccatatggcgaccgactgggaagcctatgccgtgcatatgctggaagttatgtcctcgctggaaggctatcgtaaccagtcggcaagcaacgattacgtaccgcgcccggaatcgcgcccggtaaccaaatttgaacagcgtggccatcgtctcggccacggcgtatgggacttaatgttcgagagggtgaaa

SEQ ID NO: 62 - DNA, 1440 bp, Klebsiella pneumoniae
gtgtcgcaatcagttctggtgctcggcgccagcggctatattggccagcatttagtgcgcgagttaagcgcgcggggctatccggtgctggcggcggcacgccatatcgaccgattgcaaaaactcgctttgcccggcgttacctgccggtcagtcgatctcaatcaaccgcaggacctgcctgcgctactcaccggtatcgataccctttattatctggtccacggcatgggcgaaggcggtgattttatcgcccatgagcggcgggtggcgacgtatgtgcgcgatgccctgcgtcagtcatcagtgcgccaggtgatatttctcagttcgctgcaggccccggcgcaggagcaatccgaccatctgcgcgctcgtcagattaccggcgatctcctgcgtgagtcgggcgtgccggtgaccgagctgcgggccgggattatcgtcggcgccggctccgccgccttcgaggtgatgcgcgacatggtttataacctgccggtgctaacccctccgcgctgggtacgttcgcgtaccacccctgtcgcgctggaaaacctgctcgttgacctggttgagctgctgaatcatccctccgatgcgcaccgcgtcttcgaagccgccggtccggaggtgttaagctatcagcagcagttcattcgctttatggccgtcagcggtaaacatcgcccgctcattcccattcccctgccgacgcgctggatctcggtgtggttcctcaatgtcatcacctcggtgccgccgaccatcgccaaggcgctgattcaggggctgaagcacgatctaatcgctgacgatcgggcgctgcgggcgctgatcccgcaaacgctgatccccttcgatcaggcggttcgccgcacgctgaaagaagaagagcagttagtaaactccagcgactggggttacgacgctcaggctttcgcccgctggcgaccggagtacggctactatccgaagcaggcaggttgcaccgtcgccactcaggcaagccgccaggccctgtggcaggtcgttaaccaaatcggcggtgaagaggggtattttttcggcaatctgctgtggaaaacccgcggcgcgatggatctgctggtcggccaccggctggccaaagggcggccgcagcgcgcttatctgcaaaccggcgatacggtcgacagctggaaggtaattatcgtggaggaagaaaaacagctcaccctgctattcggtatgaaagcgcccgggctgggccgattaagctttaccattaacgataaaggcgatcgtcgtgaactggacgtgcgcgcctggtggcacccgcacggtatgccaggcctgatctactggctgctgatgatcccggcgcacctgtttattttccgcggtatggcgcaacgcatcgcccggctggccgaacaaatctcaggcagagtcgaagga

SEQ ID NO: 63 - DNA, 1143 bp, Klebsiella pneumoniae
atgagtctgaatatgttctggtttttaccgacccatggtgatggtcgttatctgggtaccgaagagggcgcccgtccggtcgattatggctatctgcagcaaatcgcgcagacggcggatcggctgggcttcaccggcgtgctgatcccgaccggacgctcttgtgaggatgcgtggctggtcgcggcctcaatgatcccggtgacgcagcggctgaagttccttgtcgccctcaggccaagcgtggtatcgccgacggtggccgcgcgtcaggcggcgaccctggaccggctgtcaaacggccgggcgctgttcaatctggtcaccggcagcgatcctgccgaactggcaggcgacggcgtcttcctcgaccacaccgagcgctatgaggcctcggctgaatttacccacatctggcgtaagctgatggagggagaaaccgtcacctttaacggcaagcatcagcgcgttcgcgacgccaaactgctgtttccgccactgcagcagccgcgtccacccctctatttcggcggctcgtctgaggtagcgcaggagctggccgctgagcaggtcgatctttatcttacctggggagaaccgccggcccaggtggcagagaaaatagctcaggtgcgagagaaagccgcccggcatggtcgccaggtgcgttttggcatccgtctgcacgtgatcgtcagggaaaccaacgaggaagcgtggcaggcggcggacagccttatctcccatcttgacgacgagacgatcgcccgcgcccaggcggctttcgccagaaccgactccgttggccagcaaaggatggcggccctgcacaacgggcgacgcgataagctggaaatcagccccaacctgtgggctggcgtgggtttagcgcgcggcggcgccgggaccgcgctggtgggcgatgccgccaccgttgccgaaaggatcaatgaatacgccgcgctgggtatcgatagctttatcttttccggctatccgcatctggaagaggcgtaccgggtcggagagctgctgttccccctgcttgacgtcgcggtgccgtccatcccgcagccgcaaaacctgcgtctgcagggggaagcggtcgccaacgagtttattccgcgtaaagtagcgcaaagc

SEQ ID NO: 64 - DNA, 546 bp, Klebsiella pneumoniae
gtggcgttcgccggccgctccaacgcgggaaaatccagcgcgctgaatacgctgactaatcagaagaacctggcgcgtacctccaaaaccccggggcgtacgcagctgattaacctgttcgaagtcgctgagggcaagcgccttgtcgacctgcccggctatggttatgcgcaagtacccgaagagatgaagatcaagtggcagcgcgcgctgggggaatacctggaaaaacgtctatgcctgaagggtctcgtggtgctgatggacatacgtcatccgcttaaagatctcgatcagcagatgatcgaatgggcggtagagagcgatattcaggtgctggtactgctcaccaaagccgataagctcgccagcggcgcgcgtaaagcgcaagtgaatatggtgcgtgaagcggtactggccttcaatggcgatgtccaggttgaacccttctcttcgctgaaaaaatctggcgtcgataagctgcgacagaagctggatagctggtttaacgaaatcccgccgcaagaagccgtcgaagacgccgag

SEQ ID NO: 65 - DNA, 984 bp, Klebsiella pneumoniae
atgaaaacaaagacaagcttgatcctcaccgttgccgccctggcgttgtccggttccgccttagccgaagttaaaatcgcccttgtggcgaaatcgctgggaaatggcttcttcgaagccgccaacgttggcgcccaacaggcagccaaggagttaggtgatgtcaaagtgatctacaccggcccgaccactaccaccgccgaggcgcagatcgacgtgctgaacgggttgatcgcccagggggtggatgcgatcgccatttccgccaacgatccggacgcggtggtgccggtgctgaaaaaagcgatgcagcgcggcatcaaggtggtctcatgggactccggcgtggcgccggcaggccgtcagatccatcttaacccctcaaataacgccttaattggcgaaaccaacgtcaagcttgccgccgatgcgctgcaggcgctgaacgttgagaaaggcgaggtggccgtgttaagcgccaccccaacctccacgaaccagaacatctggattgaggagatgaaaaaggtgctaccgcagtatccgtcggtgcagctggtcaccgtcgcctacggtgacgatctgtcggataaaagctaccgcgaagcggtgggtctgctgaaatcatatccggacctgaaagtcattgtctcgccgtcgtcggtggggattgttgccgccgcgcaggcggtgaaggaccagggcaaaatcggcaaagtgtatgtcaccgggctggggctgccgtcggaaatggccggcgcgatcaagtccggcgccagcaaaagcttcgccatctggaacccgattgacctgggctacgccgccacctatctggccgacgatttagtcaaaggcacggcgaccaaaaccgaagccagtatgggcaagctgggcaaagtgaatctggacgccgaggggaatggcgcgatggccaagccgtttgtctacgatgcgagcaacatcgataagttctcgaaaattttc

SEQ ID NO: 66 - DNA, 438 bp, Klebsiella pneumoniae
atgctcggatgggtcattacctgtcacgatgagctggcgcaggagatgctggatcgtcttgaacaaaagtttggtccgctggcccagtgccgggcggtcaattactggcgcaatctcagcagcaatatgttgagccggatgatgtgcgatgcgctgcatgccaccgactccggggacggggtcatttttctcactgacaaaaccggtgcggcgccttatcgggccgcggcgctgatgagtcacaaacatacccactgcgaagtgatctccggcgtcagctatccactccttgagcgaatgtatctcctgcgaggcacgttaagcagcgtggcgtttcgccaggcgatcgtcagcgcgggcgggccgatggtgagcagcctgtggcatcagcagcagaagaaccccccgttccggttgcgccatgatgcctggggaaat

SEQ ID NO: 67 - DNA, 663 bp, Klebsiella pneumoniae
gtgcccgtgcagtgtaaaggtttcctgttcgatttagacgggacgctggtggattccttgccggtggtggagcgttcatggtgcaagtggggggatcgtttcgccattgaccatgatgaaattctcagttttattcacggcaagcaggccattacctccattcgccattttatgccggggcgcagcgaggaggatatccaggccgaatttcgctacctcgagcagatagaagccactgatattgagggtatcgtcgcgctgccgggggcattagccctgctgaatacgctcaatgaggccgggatcccgtgggcgattgtcacctccggctcgattccggttgcccacgcgcgtcaccgcgcggcgggcctgccgatgcctgaggtgttcgtcaccgccgagcaggtgaaacacggcaaaccggcgccggacgcctatctgctgggcgccgagcggctgggtctgcctgccggggagtgcgcggtggtggaagatgcgccggcggggctcctctccggactggcggccggctgtcgcactatcgcggtcaacgtgcccgccgatgcccctcgcctggatgaagccgacctcgtgctgagcagcctggaagatctggtggttgaacgccagactgacggcgtggtaaatgtgcgtcttaaagcg

SEQ ID NO: 68 - DNA, 687 bp, Klebsiella pneumoniae
gtggcgagtaagtttcagaaccgtttagtcgggacaatcgtgctggtggcgctgggggtgattatcctgccagggctgctggacgggcagaaaaagcattaccaggatgagtttgccgcgatcccgctggtaccgaaaccaggcgatcgcgatgaaccggatatgttgccggcggcaacccaggcgttgccttcgcaaccgccggaaggggcggcggaagaggtgcgggcgggcgatgccgccgcgccatcgttagatccatcgcgtattccggtgaacagcaacagcttcgatgacgttcaggagccggtggtggccgcgaaaccgcagcccaagccgcagccgaaaccgcagccgcaacagcaggcctcgacgccaacgccgccgccggctaagccacagcagcaacagccaccgcagcagcaggcggccctgccggcgccgaccggcaaagcctatgtggttcagctgggcgcgttgaagaacgccgataaggtgaatgagattgtcggtaaactgcgggcctcgggtttcaaagtctatacgtcgccttcgacgccggtacagggtaaaattacccgcatcctcgtcggcccggatgcgtcaaaagacaagctgaaaggccagctgggcgatctgcagcagatctccgggcttagcggggtggtgatgggcttcaccccgaac

SEQ ID NO: 69 - DNA, 771 bp, Klebsiella pneumoniae
gtggctattttgttttatcaaggaacaagcagtatgcgcaaaatcgcattatttattgcgatgcttctgttgccgtgcgtgtcatttgccgggctgctcagcagcaacagcccgacaacgccggtaagcaaagaatataagcagcaattaatgggttcaccggtttacattgagatctttaaagaagagcgcatgctcgacctttacgtcaaaatgggtgagacctaccagctcctcgacagctaccggatctgcaactactccggtggcctcggtccgaaacagcgccagggcgatttcaagagtccggaagggttctataacgtcacccgcagccagctcaaacccgacagccgcttctataaagcgattaacatcggcttcccgaacgcctacgatcgcgcccatggttatgaagggaaatacctgatgatccacggcgactgcgtctcagtcggctgctacgccatgaccgacagcggtatcgatgagatcttccagttcgtgaccggcgctttagtcttcggccagccaagcgtgcaggtgagtatctatccgttccgcatgaccaacgccaacatggaacgccacaaatactcctactacgcggatttctggaaacagctcaagcctggctatgactatttccagcagacccacaaaccgccggtcgtatcagtgaccgacggccgctatgtggtgagcaagccgctcagccacgaggttgtccagccgcagctggcctcaaactacacgctccccgagacaaaa

SEQ ID NO: 70 - DNA, 1365 bp, Klebsiella pneumoniae
atgaaggcacgagcgatattactcgcctctgtcctgctggtggggtgccaggcgtctaagcacgatggcaccgtcgaacagcgagcacagagcctttctgcggctggtcaaggggaagcaggcaagttcacaagtcaagcgcgctggttagatgatggaaccttctacgcgcaagaccaggatctgtggacttccataggcgacgagctaaagatgggaataccggataatccccggattcgcgaacagaaacagaagtacttaagaaataagagctatctccacgatgtaactttacgggcagagccgtatatgtactggatagccgggcaggttaagaaacgtaacatgccaatggaactggtattactacccatagtggagagcgcttttgacccacacgcgacgtctggcgccaatgccgcaggcatttggcagatcattccgagcacagggcgcaattatggtttaaaacagacccgcagttacgatgcgcgtcgtgatgtcgtcgcgtctactaccgcggcgctggacatgatgcaacgtctgaacaaaatgttcgacggcgactggttgttaacggtcgcagcctataacagcggcgaaggccgggtcatgaaggcagtaaaagcgaaccgttcgcgtggcaaacccaccgatttctggtcgctgtctctgccgcatgaaacgaaaatctacgtcccgaaaatgctggcattgagcgacattctcaaaaacagcaaacgttacggcgtaaagctgcctacggctgatgaaagccgtgcgctggcgcgcgttcgcctcgacagtccggttgatatttctcagctcgcggacatggccggtatgccggtcagcaagctgaagacgttcaatgcgggcgtaaaagggtcaacgctgggcgcgagcgggccaaagtacgtcatggtgccgcagaagcacgccgcacagctgcgtgaatcgctggcctctggcgacattgccgccgtgcagccgacgcagctcgcggacaatacgccgctgaccagccgtagctataaggtgcgttccggcgacaccatttccgggattgcttcccgtcttggtgtgacgacccgcgatctgcagcagtggaataacctgcgcggctctggattaaaggttgggcagaatctggttattggcgcaggcagcagcgcccagcgtctggcgaacaacagcgatagcatcacctatcgcgttcgtaaaggcgattcgctgtcgagcatcgccaaacgtcacggcgttaatattcgcgacgtgatgcgctggaacagcgataccgacaacctgcgcccaggcgatcagctaacgttgtttgtgaaaaataacgatcgaccagagtcc

SEQ ID NO: 71 - DNA, 1206 bp, Klebsiella pneumoniae
ttcagcgatacgcagacccatctccgcttcggtgcgcacgattttaccgcgcagcgagttggtgtatacatcgacgatttcgacatcgacaaacttaccgacgaggtccggggtaccttcgaagttgaccacccggttattctccgtacgtccggaaagctccatgatgttcttacgcgaggtgccttccaccaggatgcgctgtaccgtgccgagcatgcgacggctccaggccatcgcctgctggttaatgcgttcctgcaggatatacagacgctgttttttgtccgcctccggcacgtcgtcgaccatatcggccgccggggtgcccgggcgagcggagaagataaagctgtagctcatatcgaaattgacgtcggcgatgagcttcatggtcttttcgaaatcttccgtggtttcgccggggaagccgacgataaagtcggagcttatctgaatatccgggcgcgcttcacgcagcttgcgaataatcgctttatactccagcgcggtatgggtgcgtcccatcaggttcagcacacggtcggagccactctgcaccggcaggtgcaggaagctcaccagctccggcgtatcgcgataaacgtcgatgatatcgtcggtaaattcgatcgggtggctggtggtgaagcgaatgcggtcgatgccgtcgatggcggcgaccaggcgcagcaggtcggcaaagctgccggtggtgccgtcgtaattctcaccgcgccaggcgttaacgttctgccccagcagattgacctcacgcacaccctgcgccgccagctgggcgatttcaaacaggatatcgtcgcacggacggctaacttcttctccgcgggtatacggcaccacgcagtaggtgcagtatttattgcaaccttccataatcgagacaaaggcggtcggcccttcggcgcgcggctctggcaggcgatcgaatttttcaatttccgggaagctgatatcaactaccggactgcggttgccgcgcacggagttaatcatctccggcaggcggtgcagggtttgcggcccgaaaataatatcgacatagtgcgcgcgctggcgaatatggtcgccttcctgggaagccacgcagccgccgacgccaataatcaggtccgggttcttctctttcagcagcttccagcggccaagctgatggaaaactttttcctgggccttctcacgaat

SEQ ID NO: 72 - DNA, 1536 bp, Klebsiella pneumoniae
atggtatttgcctctcttcttgaacgccagcgcgtacgtctgttgctggcgctgttgtttggagccagcggaacgctggctttttcaccttatgacttctggccagcggctatcgtttcgctgatcggtctgcaggcgttaaccctcaaccgacgcccgctgcaaagcgccgggatcggctatttctggggactcgggctgttcggcacgggtatcaactgggtctatgtcagcatcgctcagtttggcggaatgcccggcccggttaacgtcttcctcgtcgttctgctggcggcctatctctcgctctacaccggcctgtttgccggcctgctcgcccgtctgtggcctaaaactaactggatacggatggctatcgctgcccctgtcgtctggcaaatcaccgagttcctgcgcggctgggtgctgaccggctttccgtggctacagttcggctacagccagattgacggccctctgaaaggcctcgcgccggtgatgggcgtcgaggcgattaacttcttgctgatggtagtcagcggcctgctggccctggccctcgtccagcgcaactggaagccgctggcgattgccgcgctgctgttcgccctgccgttcccgctgcgctatatccagtggtatcagctgctgccggcgcgcgcgacccaggtctcgctggtgcaaggcgatatcccacaggccatgaaatgggacgaaaagcagctggtcaataccctgaaaacctacctggcgctgacccagccgcatatcggccactcgcagctgattatctggcctgaatcggcgatcccggatctggagatcaaccagcagcagttcctcagcatgatggacgatctgctgcgcgcaaaagacagctcgctgatcaccggcattgtcgatgcgcgtctcaacaagcagaaccgttacgatacctacaacaccatcattactctcggcaaagataacccgtaccgctacgactcgaccaaccgctacaacaagaaccatctggtgccgttcggcgagtttgtaccgctggagtcgattctgcgtccgctggcgccgttctttgacctgccgatgtcctccttcagccgcggcccctacgtgcagccgcagctgatggcgcataacctgaagctgaccgcggccatctgctacgagataatcctcggtgaacaggtgcgggataacttccggccggacaccgacttcctgctgaccatctccaacgacgcctggttcggcaagtccatcggcccgtggcaacacttccagatggcgcgaatgcgcgccctggagctggcccgcccgctgctgcgcagcaccaacaacggcattactgcggtgatcggcccgcgcggcgagatccagaagatgatcccgcagtttacccgcgaggtgttgaccaccaccgtgacccccgccagcggcttaaccccttacgcccgcaccggcaactggccgctatgggcgctgacggcgctgtttggtttcgccgcgctgctgatgagcctgcgccagcgtcgccga

SEQ ID NO: 73 - DNA, 930 bp, Klebsiella pneumoniae
atgttgaaatttatccgcgccggcatgtatacctcggtacaggatggcggccgggaaggccagcgccagtgggggattagccgctgcggcgcgctggataaaccggcgatgaccattgccaatctgctggtgggcaatgcgccggaggcggcggcgctggaaattacgctgggtcaggtcgatgtgcagtttacccgccactgctggttcgcgttgaccggcgccgcctgtgaagcgacgctcgacggcgcgccggtctggttgggctggcgaatggaggcgaaggccgggcagcggctggtgctgaaaaatcctcagcatgggatccgcagctatctggcggtcgcgggcggtattgatgtccctgaagttttaggttcccgctctaccgatctgaaagtcggtatcggcggaatcgaagggcgccggttgcaggatggcgatcaagtgaagattgggaaatcgtcccgccgctttagctcctcgcgcggcgttaaacagctgccgataggcaatattattcgcgcgctgccggggccggagtatcacgaattcgacagcgtgtcgcaggagtctttctggcgctcgccgtggaagctgagtccgcaaagcaaccgtatggcttaccgcctgcaggggcagccgctcaggcgcacaaccgaccgggaaatgctctctcatggcctgctgcccggcgtggtacaggtaccgcataacggccagccgattgtgttgatgaacgatgcgcaaaccaccggcggctatccgcgtatagcctgcattattgaagccgatatttaccaactggcgcaaattccgctaggtcagccgatccatttcgtcccctgttcgctggaggaagcgctaaaagcgcgcgccgaccagcagcgctaccttgaacaactggcctggaggttaagcgatgaaaat

SEQ ID NO: 74 - DNA, 2280 bp, Klebsiella pneumoniae
atgagagccgcttttccagaatcctcttccctccccttccgccagcggcttctatacttacccgtttacgttgcaacggaggtgcccatgccgtggatcctgcttttgctcgctgcactgtttactgccccgctttccgccgccaccctccccggcgtgccgacggctaacactgataaaaacagcgccagcgaacccgatgtggaacagaaaagagcggcttatgccgcactggccgatgtgctggccaacgactccgcccgtcaggagctcattgaccagctgcgtaaagcagccgccacgccgccgcccgacagcaccccgacgctgacgccacctgcggtgaaagaagagaccacggtactggagaacgtcacccagataagccgggaatatggcgaacagctctcatcacgcttttcccagctgtggcgcaatatcaccggctcaccgcataagccctttaatccgcaaacctttaccagcgcggcctggcattttttactgctggccgggctggtgtttgccttctggtggctggtacgcctcgcggcgctgccgctgtatcgcaaaatgggcgaatggggacggcataaaaaccgcgatcgcggtaactggctccagctgcccctgaccatcgccggggcgtttatcatcgacctgctgctgctggcgctaaccctgtttgtcggtcagctgctaagcgatcgcctgaatgggaataaccctaccatcgccttccagcagagccttttcctcaacgccttcgcgctgatcgagttttttaaagctattctgcggctcattttctgcccgcgcattcctgccctgcggccctttaacctcagcgacgaggccgcgtcatactggagcctgcgcctgagcgcgctcagcagcctgattggttacggtctgatcgtcgcggtgccgattatttccaatcaggtgaatgttcaggttggcgcgctggctaacgtcgtcatcatgctgtgcattacgctgtgggcgctgtacctgatttttcataacaaagcggtgattactcaagggttgatccacctggccgaccactcactcgctttctttagcctgtttatccgcgccttcgcgctggtctggcactggctggcctgcgcctactttgtggtgctttttttcttttccctgttcgacccgggcaacagcctgaaattcatgatgggcgccaccctgcaaagcctggcgattatcggcggcgcggcgctggtgtctggcatcctgtcgcgctggatagccaaaaccatcaccctgtcgcccgccactcagcgcaactaccctgaactgcaaaagcggctgaatggctggatctccgcctcgctgaaggcggcgcgcattctcaccgtctgtgtcgccatcatgctgctgttgagcgcctggggcctgtttgacttccgggaatggctgcacaacgatgccgggcaaaaaacggtggatgtgctgatccgcatcgccctgatcctcttcttctccgccatcggctggacggttctggccagcctgattgaaaaccggctggcatcggatattcatggccgtccgctgcccagcgcgcgggcccggacgctgctgacgctgtttcgcaacgcgctggcggtggtgatcagcaccatcacggtgatgatcctgctctcggaaattggggtaaacattgcgccgctgctggcgggcgccggggcgttagggctggccatttcgtttggtgcgcaaaccctggtcaaagacattatcactggcatatttatccagtttgagaacgggatgaacaccggcgacctggtcaccatcggtcctttgaccggcaccgtggaacgaatgtcgattcgctccgtgggggtacgtcaggataccggcgcctatcacattattccctggtcctcgatcaccacctttgccaacttcgtgcgcggcattggctcggttgtggctaactatgacgttgaccgccatgaggatctggataaagccagccaggcgctgaaggcggcggtggacgatctgctggcccaggaggagatccgcggtctgatcattggcgaaccgtcgttcgccgggctggtggggctgagcaataccgcctttacgctacgcgtcagcttcaccaccctgccgctgaagcagtggacggtgcgttttgccctcgacacccaggtgaaaaagcacttcgaccgcgccggggttcgcgcgccggtacagacctggcagcagctgccgatgccgggcgccgacagcccggccgccgag

SEQ ID NO: 75 - DNA, 2307 bp, Klebsiella pneumoniae
atgaagaaacagcataattatacggtgatgcactggggaacctggcaggtggagagccgtgagggcgagatcgtggcggttaagccggtgccctgggataaaaatccctcacgcatcggccagtcgctccccgacgcggtgaccagccaaacgcgcattcgccgtccggcggtgcgcgccggctatctccagcacgggccggcgtcacgagaagggcgaggtaaagagccctttgtcgaagtcagctgggaggtggccctggacctgctggcgcgcgagctgcgctcggtcaaggcgcgctgcggcaatgaggcgatctacggcggctcctacggctgggccagcgctggacgctttcaccatgcgcagagccagctgcaccggtttctcaagggctttggcgggtacaccgccagcaccaatacctatagcagcgccgcgggcgagcgtattctgccgcatattctcgggccgctgagcccgctgcaccggcagcatacccatttttccgagctggctcgggagtgtcagctgtttgtcgccatcggcggactgccgctgcgcaatgcccaggtcaacggcggcggcgccaatgaccatatgctccagtactggctggataagatgcaggccaacggcacgcggtttatcaatatcagtccggtgcgcaatgacctcagcgcggtgcccgacgccgagtggctggccattcggccgggtaccgatatcgcactgctgctggccctgagctatgtgctgatcgctgagtctctctacgaccaggcgtttgttgccagccataccgtcgggtttgccccctatcgcgcttatctgttgggcgagcacgatggcgtagcgaaaaccccggcgtgggcggcggcgattaccggcctggacgcccagcgcatcgccgacctggcgcgggagatggcccgccaccggacgatggtgaatatctcctggtctatccagcgcgcccgtcaaggggagcaggcctactgggcgacggtggccctgaccgcgctgctgggacagctcggcaccccgggcggcggcctcgggtttggctacgcctgcaccaacctggcgggcgcggtgcgaaaagcgttttccggcccgcgcttacccgccggggagaatgcggtggacagcgttatcccggtggcgcggctgtccgatatgctgctgcacccgggagaaacctatgagttcgacggtcagcagcggcgctatcccgatatccgtttagtctactgggcgggaggcaatgcgtttcatcatcatcaggacatcaaccgactgtgcgaggcctggcgccgcccggagacggtggtggtgcatgagcagtactggaccgcgcaggccaaattctccgatatcgttctgccggccaccacctcgctggagcgagaggatatcggcagcggcggtcacgacgggtttatgatcgccatgagcgcgcagatcccgccggtgggcgaagcgcgtgacgattacgccattttctgcgatctggccgggcggctgggcttcggggaagcgttcagcgaagggcgtgacgccgggcagtggctacgtcatctctatgaggagtcaagaccgcgggcgcaggaggagggtattgcgctgccctcgttcgatgacttctggcagcaaggggtgctggaatacagcgcgccggagcggccgcaaatttttctcgccgattttcgcgccgatccgcagcgctatccgctctccaccccctccggcaaaattgaactcttttccgccaccgtcgccgggtttggctatcgcgaatgccctggccatccgtggtgggatgaacaggaggccgcccgccagcggcaggaggcggcgcgctggccgcttcatctgctctccagccagccgcgcgcccgcctgcacagtcagtacgaccacggcagcgtcagccgggcgacgaaagttcagggacgcgagccgctgtggatgcatccgagcgatgcgcaggcaagggatatccgcgaaggcagcgtggtgaaagtctataacgaccgcggggcaattctggcgggggtgcacctgagcgagcagattttgcccggcgtggtacagatgtccaccggcgcctggtatgacccgctggatccgaaggaagaacggtcgctcgataagcacggtaatcccaacgtattaaccgaggatcgcggcagttcgcgcctggggcagggctgtagcgcccagagctgttgggtggagatcgccccgtggcgagaggagctgccgccgatcactgcctttgatccgccgaaatttattgaagtt

SEQ ID NO: 76 - DNA, 744 bp, Klebsiella pneumoniae
atgaagtctgtatttaaagtttcactggctgcactgaccctggcttttgcggtttcttcccatgccgctaataagaccctggttgtcgccaccgatacggcgttcgtcccgttcgaatttaagcaaggcgataagtatgtgggttttgacgttgacctgtgggcggctatcgccaaagagctgaagctcgactacaccctgaagccaatggacttcagcggcattatcccggcgctgcaaaccaaaaatatcgatctggcgctggcggggatcaccattaccgacgagcgtaaaaaagcgatcgacttctccgacggctactacaaaagcggcctgctggtgatggtcaacgccaataataacgacatcaaagatgtcaaagatctgaacggtaaagtggtcgcggtgaagagcggcaccggctccgttgactacgcgaaagccaatatcaaaaccaaagatctgcgtcagttcccgaacatcgataacgcctatatggagctgggaaccggtcgcgcggatgccgtgctgcacgatacgccgaatattctgtacttcatcaaaaccgcgggcaacggtaagttcaaagcggtaggcgaatcactggaagcgcaaaactacggtatcgccttcccgaaaggcagcgacgagctgcgtgagaaagtgaacggtgcgctgaaaacgctgcgcgacaatggtacctataacgaaatttataaaaaatggttcggcactgaacccaaa

SEQ ID NO: 77 - DNA, 1263 bp, Klebsiella pneumoniae
atggctgctctcccgacccacgaaacacttcccgccgatcacaaagcggcgattcgccagatgaaacaggccctgcgggcgcaaattggcgacgtccaggcggtgttcgataagctctcagcgcgcatcagcgagcggctgcaggagattgagacactgaaagccgcaggccaggaggtttggccaaccgttccgttccgcgatatcgccgaaggaacagtgagcgatgagcagcgcgcggccattaagcgccggggctgcgcggtgattaaaggccacttcccacgcgaacaggcgctggcgtgggataccgcgatgctggaatatctggatcgcaaccatttcgacgatgtttacaaagggcctggcgacagcttcttcggttcgctggaggcttcgcgcccggagatctacccgatctactggtcgccctcgcaaatgcaggcgcggcagagcgatgaaatggcggcagtgcaatctttcctcaaccgcctgtggcgttttgaacagaatggcaaacgctggttcgatccggacgtcagcgtaatctatcccgaccgcatccgccgccgcccgccgggaaccacttcgaaggggctgggggcgcataccgattccggcgcgctggagcgctggctgcttcccgcctatcagcaggttttcgccaacgtttttaatggcaatatcgacgcctacgacccgtgggacgccgcgcaccgtaccgaagtggaagagtataccgtcgacaacaccaccaaatgctcggtgttccgcaccttccagggctggaccgcgctgtcggacatgatcccgggtcaggggctgctgcacgtggtgccgatcccggaggcgatggcttatgtgctactgcgccccctgctcgacgatgtgccggaagatgagctgtgcggcgtcgcgccgggcagagtgctgccgatctctgagcagtggcacccgctcttaattaaagcgttaagctcgattccagcgctgaatgccggggactccgtctggtggcactgcgacatcattcactcggtggcgccggtggaaaatcagcagggctggggaaatgtgatgtacattccggccgcgccgatgtgcgagaagaacctcgcctacgcgcagaaagtaaaaatcgccctggaaaaaggcgcctcgccgggggatttcccgcgcgaggactatgaagccagctggcaggggcgcttcaccctggaggatctgaatatccacggcaaacgggcgctgggtatgccggtc

SEQ ID NO: 78 - DNA, 969 bp, Klebsiella pneumoniae
atggcagattttccccctgtcgccagcctgcgcagctttgaggcggtggcgcgcctcggcagcgtaacgcaggccgcccacgagatgagcgtgacccattcggcggtcagccagcacatcaaacagctggaagccctggtcggcgtcacgctctttatccgccacggccgcggagtgcgcatcacggaagaaggacggctctatgccctgcaaatccgcgaggcgttacagcacatcgccgacgccacgcgcatggtgcagatcaaaccccgcaccctggaagtgaccctggcgacgatcccctcctttggctgccactggctgctgccgcggctggcgcgctttcaggcgcggcatccgcagatcgcggtgcgcctgctgaccagcctggcggtggttaacctgcaacaggagggtatcgatctggccattcgcatggggcaaggcgattgggagggaatggaaagtcggcatctgtttgccgatgaacagctggtggtcgccgcccccggctatcgcggcggtaacctgccgaccaccccgcaggcgatcgccgccagcgatattattttttccatggagtcctggcatgcctggtgcagccaggcggggctggaaaagccgatcgtccccgcaggcctgcgcctgaacgactccaatctggtgctggaggcggtccgcctgggggccggcgtggcgctggagcggcgctccctggtggcgggggcgatagcccgcggcgagctggtgcagctcaccgccgtcaccgtcccctacccctggcactactggctaaccgtctccccgcaggcggagaaccggccggaagtcgcccggttcatcgcctggctggaggaggagatcgccctctggcgccagcagatcagcgcttaccttcgccgacggcggcaggccgtccgggcggcgtgctcctgggagagacgccagaaatcgtgcccggcgggatac

SEQ ID NO: 79 - DNA, 663 bp, Klebsiella pneumoniae
atgcgtaatcagccgctgggcaatctcgccgccggcgccgttgaccacgttaatcaccccatccgggatacccaccgcttttgccagctccgccacgcgcagcagcgtcagcggcgtatattcgctcggcttgaggacgatggtgcagccgcagaccagggccgccgccagcttccagatggcaatcatgatggagaagttccacggcacgatgccaaccaccacccccagcggctggcggcgggtaaaggcggtatatttctccccggccatcgatggcagcgagacatccagcgtttcaccggtgactttccccgcccagccggcgaagtagcgcaggaacgccaccgactggtccagctcgagcatccgcgccagcgtgatagttttgccggaacagagactttccagctgcgccagcgcttcgcgatgctctgccagcgtgtccgccagcttcagcagcagcgcgccgcgcgccagcgtcggcatctcgcgccactgactaaacgcctggcgggcgctctccatagcgcgatccgcctggtcactatccgccgcggtgacctcggcaatcgcccgcccggtcgccgggttgatcaccgcgaacggcgcgccgcggcccgcctcacgttgaccggcaataaactgcccgtgcggctggcg

SEQ ID NO: 80 - DNA, 1005 bp, Klebsiella pneumoniae
atgcggttcatctggctctatacggaattgaaaaacgctcccacattaaaaacgtattcagccgccgtggactggaacgtccccggccactattttgcagaaaccttttcgcgttctggaatgaacccgtctggccaatccatcaggggtgaaataatgaaaaaatcattggcatcaatgtgtctgagcgctgtattaacggtcgctttttcttatcacgccgtcgcggccgatcttccggaaatagaaaaatccggcaccttgaaagtggcgacggaagatgattatgcgccgtttaactttatgaataatggccaggctgatggctttaacaaagatatgcttgaggaattacgtaagtacgcaaaattccatgtcgaccagagcatattaccgtggaccggattattagcggctgtctccaccgggcaatacgatatggccttaaccggggcggttattaccgatgagcggctgaaggtctttgatttcaccccaccgtgggcctccgcgcagcactatttcgtcaaacgcgctggcgatacctcgctaaataccattgccgatctcagcggcaaaaaagtgggggtacaggccgggagcgcgctgctggcgcgtttgccggagctgaaggcgatgctggagaagaccggcggcaagctggggccggtggtggagtatccctcctatccggaagcctacgccgacctggcgaacaagcgactggattacgtgattaacgtggtgatctcggtaaacgacctggcgaaagccaaaccgaaggtcttcgccaaagggctggccgtctccggaccggggtatatggcgtggccgatcccgaaaaactcgccgcagctgctggcctatatgaccaggtttatgaaccacatgaaggagaccggcaagctcgccgaactgcagaaaaaatggttcggcgaaacctatgacaacctgccgaccgaggcgatcaccagcccggaacagtttcacaaactcgccggactg

SEQ ID NO: 81 - DNA, 1899 bp, Klebsiella pneumoniae
atgaaattacagaattctttccgcgactatacggctgaatcctcgctgttcgtgcgccgggcgctggtcgcttttttggggattttgctgcttaccggcgttctgatcgccaacctgtacaatgtgcaaatcgttcgcttcgacgactatcagacgcgctcgaacgaaaaccgcatcaagctggtgccgatcccgccgagccgcggcattatttacgatcgcaacggcaccccgctggcgcttaaccgcaccatttaccagctggagatgatgccggagaaagtcgataacgtacagcagacgctggatgcgctacgcgacgtcgtcgatttaaccgacgatgacatcgccggtttcaaaaaggagcgcgcccgctcccatcgttttacctcgattccggtaaaggtcaacctcagcgaagtgcaggtggcccgctttgccgtcaaccagtaccgctttcccggcgtggaagtcaaaggctacaagcgtcgttattacccctataattcggcgctgactcacgtcattggctatgtctcaaaaattaacgataaagacgtcgaccgcctggataaagagggcaagctggccaactacgcctcgacgcacgacattggtaagctgggtatagagcgttattacgaggacgttctgcacggtcagaccggctacgaagaggttgaagtgaacaaccgcggccgcgtcattcgtcagctgaaagaggtgcctccgcaggccggacgcgacatttacctcaccctcgacctcaagctgcagcagtatattgaaacgctgctggccggcagccgcgccgccgtggtggtgaccgacccgcgtaccggcgctattctggcgctggtttcaaccccgagctatgacccgaacctgttcgtcgacggcatctccagcaaagattactccgcgctgctcaacgacccgaacacaccgctggtcaaccgagcgacgcagggggtctatccgccggcgtcgacggtcaaaccgtacgtcgccgtctcggcgctgagcgccggggtgatcacccgcaacaccagcctcttcgaccccggctggtggcagttgcctggctcagagaaacgctatcgtgactggaaaaagtggggccacggccatctgaacgtcaccaaagcgctcgaggagtctgcagatacctatttctaccaggtcgcctatgacatgggcatcgaccgtctctcagagtggatgagcaagtttggctacggccactacaccggtatcgacctctccgaggagcgctctggcaacatgccgacccgcgaatggaagctcaagcgctttaagaaaccctggtaccagggggacaccattccggtgggcatcggccagggttactggaccgccacgccgatccagatgaacaaagcgctgatgatcctgattaacgacggcgtggtgaaggtgcctcatctgctgcagagcaccgtggaagacggcaagcccgtaccctgggtccagccccatgagccgccggtaggcgatatccattccggctattgggaaatcgccaaagacggcatgtacggcgtggccaaccgcggcaacggcaccgcgcacaaatacttcgccagcgcgccgtataaaatcgcggccaagtcaggtaccgctcaggtgttcggcctgaaggccaacgaaacctataacgcgcaccggatctccgagcgcttgcgcgaccataaactgatgacagcgtttgcgccttataacaacccgcaggttgccgtggcgatgattctggaaaacggcggcgccggcccggcggtcggtacgattatgcgccagatcctcgatcacatcatgctgggcgataacaacactacgctgccaagcgaaaacccggcggtaaccgcaggggaggatcaa

SEQ ID NO: 82 - DNA, 2226 bp, Klebsiella pneumoniae
atgaataacaggatcaaatccctggccttgctggtcaatctgggaatttacggggttgcttttccgttaagcgcagcggaaaccgccaccgacgataaaaacagcgccgctgaagagaccatggtggtcaccgccgccgagcagaacctgcaggcgccgggcgtctccaccatcaccgccgatgagatccgcaaacgccccccggcgcgcgacgtctcggagatcattcgcaccatgccgggagtcaacctgaccggcaactccaccagcggccagcgcggcaacaaccgccagattgatatccgcggcatgggcccggaaaataccctgatcctgatcgacggcaagccggtcaccagccgcaactccgtgcgccttggctggcgcggcgagcgcgacacccgcggcgataccagctgggtgccgccggagatgatcgaacgcatcgaagtgattcgcggcccggccgccgcccgctacggcaacggcgccgccggcggcgtggtgaatatcatcaccaaaaaaaccggcgatgagtggcacggctcatggaacacctatatgaacgccccggagcacaaggatgaaggctccaccaaacgcactaacttcagcctcagcggcccgctgggcggcgattttagcttccgcctgttcggtaacctcgacaaaacgcaggccgacgcctgggatatcaaccagggccatcagtccgagcgtaccgggatctatgccgatactctgccggccgggcgcgaaggggtgaaaaacaaaaacatcgatggtctggtgcgctgggaattcgctccgatgcagtcgctggagtttgaggccggctacagccgccagggcaacctctacgccggcgacacccagaacaccaactccaacgacctggtaaaagagaactacggcaaagagaccaaccgtctgtatcgcaacacctactcggttacctggaacggcgcctgggacaacggggtgaccaccagcaactgggcgcagtacgaacgcacccgcaactcgcgcaaaggcgaaggcctggccggcggcaccgaggggatctttaacagcaaccagttcacggatatcgatctggcggatgtgatgctgcacagcgaagtcagcattcccttcgactatctggttaatcagaacctgacgctgggcagcgagtggaatcaacagcggatgaaggataacgcgtccaacacccaggcgctgtcgggaggcgaaattccgggctacgacagcaccggccgcagcccgtactcgcaggcggaaatcttctcgctgttcgccgagaacaacatggagctgaccgacaccaccatgctgactccggcgctgcgtttcgatcatcacagcattgtcggcaataactggagcccgtccctcaacctgtcgcagggcctgtgggatgacttcacgctgaagatgggcatcgcccgcgcctataaagcgccgagcctgtatcagaccaacccgaactacattctctacagtaaaggccagggctgctacgccagtaaagacggctgctatctgcagggtaatgacgacttaaaagccgagaccagcatcaacaaagagattggcctcgagtttaaacgcgacggctggctggcgggcgtcacctggttccgcaacgactaccgcaacaagattgaagcgggctatgccccggtctatcaaaacaataaaggtaccgatctctaccagtgggaaaacgtgccgaaagcggtggtggaaggtctggaggggacgttgaacgttccggtgagcgagaccgtcaactggaccaacaacatcacctatatgctgcagagtaagaacaaagagaccggcgatcgtctgtcgattatcccggaatacacgctgaactccaccctgagctggcaggttcgcgatgacgtttcgctgcagtcgaccttcacctggtacggcaagcaggagccgaagaagtacaactacaagggtcaaccggtcaccggcagcgagaagaacgaggttagcccctacagcatcctcggcctgagcgcgacctgggacgtcaccaaatacgtcagtctgaccggcggcgtggataacgtcttcgataagcgccactggcgcgcgggcaacgcccagaccaccgggggcgccaccggcacgatgtacggcgccggcgccgagacctacaatgaatcgggccgcacctggtacctgagcgtcaacacccacttc

SEQ ID NO: 83 - DNA, 609 bp, Klebsiella pneumoniae
acgcaggtcgcgaaacgcgtcccccagttcacggccgtcatactccaccacctccagcgcacgaccgacgtcgactgcgccgggttcatccggatagtaatcgggcgagagcggacgcaggctgtactttactgccccctcacgctcgagaaaggccagcacctcccgcccggcgctgacaaacgcttcggcaagatcttctcggtactggccctcgccgataatggttcgcaggtaggttttcatcgcctcggcgctaccgcttttgccctcggcgcgcgcctggtcggtatcgtgcagccacacggcgccgccggagatggccgaggtgccgccgaactggccggctttctccagcatcagcaccgacagccctttacagcaggcggtgaccgcggcggcaaaaccggccgcgccgctgccgatgacgatcacatcccagctcttcatgccgccgctccctgcgcctgcgggatggcgccgataaactggcccatcagcctcatctgcgccagcgccatttccggcccggtctgtactttacaaccacgtgcggcggcgaaagtgagcaacggcgtcatcaccggggcggtgacaacgtcggccaca

SEQ ID NO: 84 - DNA, 939 bp, Klebsiella pneumoniae
atgaggggtgtgatacagcagacattatgccagcaaatgacacacttttcacggcctgcggtaaattccaccgcggcgcttgtgctaaggtctttgtcagatgagccggaaacccgcgctcaaacggttattctgtacgtatttataaggagtcccatgaccagcagcctatcgcgacacccggcttttttatccctgcagggcggcatcaattttcgcgacctgggcggccagcttgccgccgacggacgccgcgtccgcagcggcaagctattgcgatccggcgcgctaaaccggttaacggcggaggatctcaaccacctcgatactttgccgctcagccgggtgctcgactatcgcgaccccggagaggtagcccgtactccggacaagcttagcccgcttacccattatcttaacgcgccggccaatccgccggtgagcgaggtaaatgcgaaggtcaccgagctgaatgccgccacccttaacgcgctgaacggcgagcagtttatgctgcaactctaccgccagctgccgtttaacaacccggcctatcgccagctcgccgcctggctgaccacgccttttgaaggcgctttactgcaacactgcgcggtcggcaaagatcgcaccggcgtcggctgcgcgttaacgctgttcgccgtcggctgcgacagcgaaacggtgatggaggagtatctccttacccacggcatgctgacgcaggtggaggcctggatgttggagctgctcggcaacgacctcactgcccaggggcgccaaagcctggcggatattctgacggtaaaagagtcctatctcgccgccgcgctgtcggctattcaccagcgctatggcaccgtcgacgcctggctggcggcagagtaccagcttacggcgccggttcgcgccgcgctgcaggcccggctgctggaagag

SEQ ID NO: 85 - DNA, 1419 bp, Klebsiella pneumoniae
atgatttcagcacgttggcgctgttctgggtgggtaccggtctgggttccgcgctactctgttttaccactgccgccatcgtcgcccggcgccatgccgtcgaacggcagacctcgttctcctcataaccgattaacgaataaggaagaagatatgatgcctgcaagacatcaggggctgttacgcctgtttatcgcctgcgcgctgccgctgctggcgctgcaatctgccgccgccgcggactggcagctggagaaagtggtcgagctcagccgccacggtattcgtccgccgacggccggcaaccgggaagccatcgaggccgccaccggccgaccgtggaccgagtggaccacccatgacggggagctcaccggccatggctatgccgccgtggtcaacaaagggcgtgcggaaggccagcattaccgccagctcggcctgctgcaggccggatgcccgacggcggagtcgatatacgtgcgcgccagcccgctgcagcgtacgcgagcgaccgcccaggcgctggtggatggcgccttccccggctgcggcgtcgctatccattatgtcagcggggatgccgatcccctgtttcagaccgacaagttcgccgccacgcaaaccgaccccgcccgccagctggcggcggtgaaagagaaggccggggatctggcgcagcgtcggcaggcgctggcgccgaccatccagctattgaaacaggcggtttgtcaggccgataagtcctgcccgatcttcgataccccgtggcaggtcgagcagagcaaaagtgggaagaccaccattagcggactgagcgtgatggccaatatggtggagacgctgcgtctcggctggagtgaaaacctgcctctcagccagctggcgtggggcaagatcacccaggccaggcagatcaccgccctgctgccgctgttaacggaaaactacgatctgagtaacgatgtgttgtataccgcgcaaaaacgcgggtcggtgctgctcaacgctatgctcgatggcgtcaaaccggaggcgaatccgaacgtacgctggctgctgctggtggcccatgacaccaatatcgccatggtgcgcacgctgatgaactttagctggcagctgccgggctacagccggggaaatatcccgccgggcagtagcctggtgctggagcgctggcgcaacgcgaagagcggagaacgctatctgcgggtctatttccaggcccagggcctcgacgacctgcgtcgtctgcagacgccggacgcgcagcacccgatgctgcgtcaggagtggcatcagccgggctgccgtcagaccgacgtcggtacgctgtgtcccttccaggcggctattaccgccctcggtcagcgtatcgaccgatcatccgccccggcggtagccatggtcctgccg

SEQ ID NO: 86 - DNA, 3090 bp, Klebsiella pneumoniae
atgctgaccttttttatccgtcgtccgcgatttgccatggtgatcgcgctgctgctgacctttgtcggcgcggtgtcgctgaagctgatcccggtggagcagtacccggcgatcacccccccggtggtgaacgtcagcgccagctggccgggcgccagcgcgtcagacgtggcggaagccatcgccgccccgctggagacccagctcaacggcgtcgatcatatgctgtatatggagtccaccagctcggatgaggggacgtaccgcctgagcataaccttcgcggcgggcaccgatgccgacctggcggcgatcgacgtgcaaaaccgggtggcgcaggcgctggcgcagctcccggcggaggtgcagcagaatggcgtccaggtgcgcaagcgcgccagcaatctgcttatgggggtaagcctctactcgccgctgggcacgctgtcgccgctgtttgtcagcaactacgccagcacccaggtgcgcgaggcgctggcccgcctgcccggcgtcggcgaggtgcagatgtttggcgcccgggattacagtatgcgcatctggctgcgcccggaccgcatgaacgcgctcaacatcaccacggatgatgtcgcccaggcgctgcgcgagcagaatgtgcagggcgcggcggggcaggtgggcaccccgccggtatttaacggccagcagcagacgctgaccatcaacgggctggggcgtctgaacgaggcggccagctttggcgagattattatccgccgcggcgcgcaggggcagctggtgcgcctcgccgacgtagcgaccattgagctgggcgcccgcagctacagctccggcgcccagctgaacggtaaagcgtcggcctatctggggatctatccgacgcccaccgccaacgccctgcaggtcgccagcgcagtgcgtgcggagcttaaccgcctgcacactcgctttccggcggatctcacctgggaggtgaagttcgataccacccgctttgtggcggcgacgatcaaagagatcggcgtctcgctggcgctgaccctgctggcggtggtcgtggtggtgtcgctatttttgcagagctggcgggcgacgctgatcgtagtgctggcgatcccggtgtcactgatcggcacctttgcggtgctctatctgctgggctacagcgccaacaccctcagcctgttcgcgatcattctcgccctgacgatggtggtggatgacgccattgtggtggtggagaatgtggaaaccaaaatggcggaagggctggatcgcctgcaggccaccgcccaggcgctgcggcagatcgccgggccggtgatcgccacgaccctggtgctgctggcggtgtttgtgccggtggcgctgctcccggggatcgtcggcgagctgtaccggcagtttgccgtgacgctctccaccgcggtggccctgtcgagcctggtggcgctaaccctgacgccggccctctgcgcgctgctgctgcgcccgcgtcctgcccggccggcggcggtgtggcgggcgtttaaccgtcttctcgacggcacccgcgacggctatggccggctggtaggctggatgaaccgccgtccctggctggcgctggcggcgacggtggcggcaggcgcgctggtggcgttcagcttcacctcgatgccgaaaggcttcctgccgcaggaagatcagggttacctgtttgccagcgtgcagctgccggaggcggcgtcgctggagcgtaccgaagcggtgatggcccaggcgcgtaaactgctgatggctaacccggcggtggaggatgtgattcaggtgtccgggttcaacattctcaacggcaccagcgcctctaacggcgggtttatctcggtaatgctcaaggactggcatcagcggccgccgctggatgcggtgatggcggatattcagcgccagctgctgtcgctaccggaggcgacgatcatgaccttcgcgccgccgaccctgccgggcctgggcaatgcctcggggtttgatctgcgcatcctggcgcaggccggtcagtcgtcggcggagctggagcaggtgacgcgggagatcctccagctggcgaaccagtatccgcagctgagccgggtgtttaccacctggagcagcaacgtgccgcagctgaccctgacggtccaccgcgaccgggcggcgctgctggatgtgccggtggcgcagatcttcagcagcctgcagacggcgttcggcggcacgcgcgccggcgatttcagccgtaacaatcgtgtctatcatgtggtgatgcaaaatgagatgcagtggcgcgagcgggcagagcagattagcgagctgtacgtccgcagccgcgacggcgagcgggtgcggctgagcaatctggtcaccattacgccgacggtgggggcgccgtttattcagcagtacaatcagttcccgtccgtgtcggtgagcggttcagcggccgagggggtcagcagccgcacggcgatggcggccatggagcagattttgcaggcccatctgccgccgggatatgactatgcctggagcgggatctcctggcaggagcagcagaccggcaatcaggcggtgtggatcgtgctggcggcggtggcgatggcgtggctgttcctggtggcgcagtatgagagctggacgctgccggcgagcgtcatgctctcggtgctgttcgccatcggcggagcgctgctctggctgtggaccgcgggctatgccaacgatgtgtatgttcagatagggctggtgctgctgatcgccctggcggcgaagaatgcgattctgatcgttgagttcgcccgcagccggcgcgaggaggggctgtcgatagtcgacgctgcgcgcgagggggctacccgccgcttccgcgcggtaatgatgaccgcggtgtcgtttattatcggcattatgccgatgatgctcgccaccggcgccggggcgcagagccggcggatcatcggcaccacggtattcagcgggatgctggtggcgacgatggttggcatcctgtttatcccgtcgctgtatgtactgtttcagcgtatgcgcgagtgggcgcatcggcggggg

SEQ ID NO: 87 - DNA, 933 bp, Klebsiella pneumoniae
gtgcggcgcgctgctgctggcgctggccgattacggcgcccaacggctgtttatgccgtggcagctgccggttggcgtgttaaccgtcagcctcggcggtatttaccttattgcattgttgattcaggagtcccgcaaaaaatgagtgctgtcccctcccgtttgcgcggcgagcagttaaccctggcctacgggaacaagaccatcgccgagtcgctgaacgtgaccatccctgacggtcacttcaccgccattatcggccccaacggctgcggcaagtcgacgctattgcgcaccctcagtcgcctgatgacgcccgccagcggccacgtctggctcgacggcgcgcagatccagcagtacgccagtaaagaggttgcccgccgcatcgggctgctggcgcagaatgccaccacccctggcgatatcacggtgcaggagctggtggcccgcgggcgctatccgcaccagccgctgtttacccgctggcgcaaagaagatgaagaggcggtgaacaaggcgatgcgggcgaccgggatcagcgatctggcgctgcagagcgtcgacacgctttccggcggccagcggcagcgggcgtggattgcgatggtgctggcccaggaaacggcgattatgctgctggatgagccgaccacctggctggacatcagccatcagatcgacctgctggaactgttgagcgagctgaatcgcgagaagggctataccctggcggcggtgctgcacgatcttaaccaggcctgccgctacgccacccacctgatcgccctgcgcgacggcaggatcgtcgccgagggggcgccgaaggagatcgtcaccgccgatctgattgaacggatttacggtctgcgctgcacgatcattgaagatccggtggcgcatacgccgctggtggtcccgctgggccgccgg

SEQ ID NO: 88 - DNA, 2454 bp, Klebsiella pneumoniae
gtgtggaatacatccccatatactggattacatattaacgacgatgcagtggagtgtggcgtcgtcggctacctggcggactttaaactaagagagagctctatgaatcctgagcgttctgaacgcattgaaatccccgtattgccattgcgcgatgtggtggtttatccgcacatggtcatacccctgttcgtagggcgggaaaaatctatccgttgcctcgaagcggccatggaccatgataaaaaaatcatgctggttgcgcagaaagaagcgtcgacggatgagccgggtgtaaacgatcttttcaccgttggaaccgtggcgtctattttgcagatgctgaagctgccggacggcaccgtgaaggtgctggtcgaagggctgcagcgtgctcgcatttctgcgctgtctgataatggcgagcatttctcggcgaaagcggagtatctcgactcgccggcgattgacgaacgcgagcaggaagtgctggttcgcaccgctatcagccagtttgaaggctatatcaagctgaacaagaagatcccaccggaagtgctgacgtcgctgaacagcatcgacgatccggcgcgcctggcggataccatcgcggcgcacatgccgctgaagctggctgacaagcagtctgtgcttgagatgtccgacgttaacgaacgtctggaatatctgatggcgatgatggaatcggaaatcgatctgctgcaggttgagaagcgcattcgcaaccgcgtcaaaaagcagatggagaaatcccagcgcgagtactatctgaacgagcaaatgaaagcgattcagaaagaactcggcgagatggacgacgccccggacgaaaacgaagcgctgaagcgtaagatcgacgcggcgaaaatgccgaaagaggcgaaagaaaaaaccgaagcggaactgcagaagctgaagatgatgtcgccgatgtctgcggaagcgaccgtcgtgcgtggctacatcgactggatggtgcaggtgccgtggaatgcgcgcagtaaggtcaaaaaagacctgcgtcaggcccaggagatcctcgataccgatcactatggcctggagcgcgtgaaggatcgcatccttgaatatctcgcggtgcagagccgggtgaacaaaatcaaggggccaatcctttgtctggtgggaccgccgggggtaggtaaaacctcgctgggtcaatccatcgccaaagcgaccggacggaaatacgttcgtatggcgcttggcggcgtgcgcgatgaagcggaaatccgcggtcatcgtcggacctacattggctcgatgccgggcaaactgatccagaaaatggcgaaagtgggtgtcaaaaacccgctgttcctgttggacgagatcgacaaaatgtcttccgacatgcgcggcgatccggcttccgcgttgcttgaggtgctggatccggaacagaacgtggcctttaacgaccactacctggaagtggattacgatctcagcgacgtgatgttcgtggcgacttccaactccatgaacattccggcgccgctgctggaccgtatggaagtgattcgtctctccggctataccgaagatgaaaaactgaacatcgccaaacgtcatctgctgccgaagcagatcgaacgtaacgcgctgaagaaaggcgagctgaccgtcgacgatagcgccattatcggcattattcgttactacacgcgggaagcgggggtacgtagcctggagcgtgaaatctccaagctgtgccgcaaggccgttaagcaactgctgctggataaatcgctgaaacacatcgaaattaacggtgagaatctgcatgattatctcggcgtacagcgcttcgactatggccgcgccgatagtgagaaccgcgtcggtcaggtgaccggtctggcgtggacggaagtgggcggcgatctgctgaccatcgaaaccgcctgcgtgccgggcaaaggcaagctgacctacaccggctcgcttggcgaggtgatgcaggagtcgattcaggctgcgctgacggtggtacgttcgcgggctgacaagctgggcattaacgccgacttctacgagaagcgtgacattcacgtgcacgtgccggaaggggcgacgcctaaggatggtccgagcgcgggtattgccatgtgcacggcgctggtctcctgcctgaccggcaacccggtacgcgctgatgtggcgatgaccggtgaaatcactctgcgtggtcaggtgctgccgatcggcggtctgaaggaaaaactgctggcggcgcatcgcggcggcattaagactgttctgattcctgatgagaacaaacgcgaccttgaagaaattccggataacgttatcgccgatttggatatccatccggtgaaacgaatcgaggaagttctgacacttgcgctgcagaacgaaccgttcggcatgcaggttgtgaccgcgaaa

SEQ ID NO: 89 - DNA, 930 bp, Klebsiella pneumoniae
atgcagttacagaaattagtcaatatgtttggtggggatcttatgcgtcgctatggcgaaaaggtccataagctaacgctgcacggcggttttagctgcccaaaccgcgacggcacgctgggccgcggcggttgcactttctgtaacgtggcatcgtttgccgatgaggcgcagcagcatcgctctatcgccgaacagctcgctcatcaggcgcagctcgtcaaccgggcgaagcgctatctggcctattttcaggcctacaccagcaccttcgctgaagtgcaggtgctccgttcaatgtatcgtcaggccgtcagtgccgcaaatatcgttggcctgtgcgtcggcacccgcccggactgcgttccgcaggcggtccttgacctgctgagtgaataccatcagcaagggtatgaggtatggctggagctggggctgcaaactgctcatgataagaccctgcatcgcattaaccgtggacacgatttcgcctgttatcagcgtaccgcgcgcctggcgcgagagcgggggctgaaagtctgtacgcatctgatcgtcggtctgcccggagagagccaggggcattgtctgcagacgctggagcaggtagtggcgaccggcgtggatgggatcaaattgcatccactgcatattgtgaaaggcagcattatggccaaagcgtggcaggccgggcgtctcgatggcattgagctggaggcgtataccgtcaccgctggagagatgatccgccatacgccgccggaggtgatctaccaccgtatttccgccagcgcccgtcggcccacgctgttggcgccgctgtggtgtgaaaatcgctggaccggcatggttgaactggatcgttatctgaatcagcagggcgctcagggctcggcgctgggccgtagctgggttgctccccaggctgag

SEQ ID NO: 90 - DNA, 921 bp, Klebsiella pneumoniae
atgaacaaaatcattgaaaatgattttagtcgtatcgatctgaatctgttgacagtcttgatggtgctgtaccgcgaagggagcgtcacccgcaccgcagaggtactgcatcttggccagccggctatcagcggggcgctgaaacggctgcgcgagatgtttgacgacccgctgttcgtccgcagcgccagaggcatgctgccgacgccgcgggcgcaagcgctgatgaccgacctgcagccgctgatggaaaaccttcattcggcgatgtttggcgccggagagttcgtcccggcgcgcgcgcagcagctttttcgcatcggcctcagcgactggagcgaacactggctgatgcccccgctgttacccgggctgatgcaggaggcgcccggagtgtcactgcagtcgatagccgccgaccccttccaggttcgccagttgctggaggaggagcgcattgatgtcgcggtgtctgtcaacaaacagagccgcggggaggtggtcagcgagccagtgatgaccatgggagtcaccaccctgtggtcgccgcagcagatcccctgccgcgggccgctgtcggtgagcgactttgtcgcctgggaacacgtgatggtggcctatcgcgaaaccggccacggtgaaattgaccgccagctcgccagccagggactcgcgcggcgcgtgcgctttgccacgcagaatttctccacctttcccctgctgctgaccaccctgccgctgttcgccaccgtcccgcaggggctggcgcagcgctggcaggcgcagtatgcgctgcgcgcggacgctccgccggtagcgtatccggaatttacgctgtgcattttgcggcacaaacggcgggcgcaggatccggcgctgaactggctggtgacgaagttaaaacaggccatgcgcggccaa

SEQ ID NO: 91 - DNA, 2430 bp, Klebsiella pneumoniae
atgctgatagatcgggacggcattcgcctgatgggtgagcgaaaaggtcagcaggctaccagccaggcgcgccagctccgggtagaggcgttccggcgggctttgccggtaacgcagaaagtaccccagcaccggctcggcgctgttcagcgcattcagcaaccagaacagagagacatcggctacggcaaaatcagccatccgttcattgctttcgcgacgcatggccatcaggcgcgtcagacgagcccggagctggacgagcagctgttcaagctgcctcgccagccagcggctgccctggatctgcagcagcggcgggagaaacgtctcgtcgataagccaggccccctgcgagtcccgctgcaggcgaacaagcggacaggtcaggtaatcgctgttgtcctggtgggcgaagcggaggatcagctccggctgtatgacggcaatctgccgggtatcatccccaaactggttacggacatcgcgccagcgctgccggaagcgcaccggcctttcggccacctcctccggcttcagacagttgccgccattcgcctgcatcaggggcagcgccagcacgatcaccgcctcgccggacgcgccgtccagcgacagcgcggacggcagcgcatcggcattgtccgtatcaatcatcgtgccatcctggaaccggacctgcagcctgtgagcctgcaggcggcccagtttgagcatctctggttcgaaggtcgcctcaaccactccccaggggtggttaagacccatccgggcaatcacttccgcagtccaggctgcatacgcagcctgctgttgaaaatgctgaggcgacaccataatgccccggccccacaacggacgttccgttttcatcatcgtccgaacctacgccttcgcctttggcatctggctaaccagcgacagattgacgtccatcccctcgacctggaagtgcggcaccgcgtacagcttcacgcggaagaagcccgggttatcctcgatatcttccaccaccacgctggcatcgcgcagcggatgggaggcctgcagctcgtcgccggggtcggtcatttcggtcaccaggctccgcacccaggtgttcagctccagctccagcagacgccggtccttggtggtgccgatattttcgcgctggatcatcttcaggtagtgcgcgatgcgcgacagcaggaagatgtaaggcagacgcgcgttgatacggctgttggcggtggcgtcggcggtatcgtacagcgccggtttctgcgcggagttggccgagaagaagcaggcgtaatcgcgatttttgtagtacgacagcgggataaagcccaggctggcgaactcaaactcccgcgtttccgggatcatcacctcggaagggatcttcacctggttgccggtgcccagatcgtacagatggataggcaaatctttcaccgcgccgcccgcctgcggaccgcgaatttgcacgcaccagccgttgttaacaaagctcttcaccatattagatgcgaaggagaacgccgcgctggtccagagatatttttcgtgatccgggcccttcacctgctcgacatagttgaagctgcgcaccggcacggtgtccggaccgtacggcagacgacccagcacgcgcggcatcaccaggccgatgtagcgggcatcgtcagtttcgcgaaacgccttccagcggatatattccgcacgatcgaagtagttgccgatatccttaatggcagccacctcttccatggtctctttcaggaagaaggccgggccgacggcgccgataaacggcatatgggcggccgcagagacgcgggagatattgcgcagcagcgccacatcctgcgggctggcgtcgaactcataggccgagatcaccgagccgatcggctcgccgccgggagtgtcatactccgcggtataggtgtgccagtacaggccgctctggataagctccggcgcgtcctcaaagtcctggcgcagatcgtctttggcgacgtcgaggatctccgttttgacgttctgccgatagtcggtgttgtccaccagctgtttgaggccgcgccacagggattcgacctgctgaaactcctgatggtgcatcaccgcgtccagctgacggcttatctggaaatccagctcggcgatatggtggtcgatcagcgttttgtcgagcttttccacccgctggccggactgacggatgcgttccataaacacctgcatcgccgcggtgagacgctccgccgccggcgcctcggagagcgcggcatcgtccagaaagtcgttgatatccccgaggcaagacgccggggtgagattaattttttcaaacagcgaggcgtaaacgccctcgcccgcgctgttttcctgcagcgtggtttgcccctgaacaggggcgttttctgtggtaacagacat

SEQ ID NO: 92 - DNA, 1677 bp, Klebsiella pneumoniae
atggataagccactgcggttgaagttaaaaaagtgctaccacctggctcgcccggcgcatgtggttaacgcttgttttatcgcagtgctgtttttctccacgctgctgatctggcgtgaaatcaatgtcctggaagaggcctacgtggccaaccagcgtaataatctggctaacgtcgctcatgaaatggatgggctgttgcagttcaacatcgacagaatgatgttttttcgccatgggatgcaggcggcgctcgaacagccgctcgatatcgatgtattgcgtaaggccagccaacgctatctgagccagcgccatcagcaggcctggcgggtggcgctaccgaatcggcgtacgctgccggtgtttggcatctcgggcagcgtcgctggcgacaaccctatcctgctggtggacgatccgctggcggctgatgaactaatggcgacgctcgagctgggttatctgctaaatctgacgcagcacgatcgcgatttcgccgagcggatgcagtatatctctcgtagcggcttttttacctcgaccctgccgctgcgggatgagtcgcaggtgataacgcactattcccaagccctcggcgctccgtggtttacccgccagacccagcgaaataatccggggcgaggcgttatctggcaaacctttcctgacgatgacccgcagctggaagagcaggtggtcaccgcttcgataccgttggattttgccggttactggcgcggcgtgctggcgatggatttctcagtcagtgaaatcaaagcgtttttggttagcgccatgcaggggggacaagagggagagtaccaactttatgatagccatttgaacctgctggcttcttccgcgccggggaatgtcctgaccctgctgtcgccgcgcgagcaggagctgctgagccgcgcgtttgtccatgataaccagggagggctgcgtctgctgacgcgctatatcagctgggccaaactgcgcaattttgacggcgtgctgctgcggatccacactctgcgggaaggcgtccgcgggaactttggcaccatcaccatcgccctgaccctgatgtgggtcctcttcaccttgatgctgttgctctcctggctggtgatccgccgcatggtccgcaacatgagcgttctgcaaacctctctggagtggcaggcatggcatgatgccttgacccgcctgctcaatcgcggggcgctgtttgaacaggcgatggcggtagccagcgactgccagcgcagcggacggccgctggcggtgatccaactcgatctggatcattttaagcacatcaacgatcgctatggtcatcaggcgggggacagggtgctgtcgatggtggccagtacgctgtccagcgcggttcggcagggcgatctgctgggcagagtgggcggagaagagttttgtatcgtgatgccgaataccaccctgcaggaagcggcggcggtggcggagcgattgcgccagcgtatccagggacgggaagtctttttgcataacaacgtgacgctgcgggttagcgcctcgttaggggtgagcgccagcgaagagcggggggagtatcagtttgaagcgctgcagtcggtggccgatgggcgactctatctggccaagcaaaatgggcgtaaccaggtctgttttcgcagcgcagcg

SEQ ID NO: 93 - DNA, 933 bp, Klebsiella pneumoniae
atgccacgggctgtcagcctcgtagaccccagtggcctcggtcatatagccgccgaggtagctcttcagctcagcacggttcagacacaagttggccgctttgcgcacgcggatgtcctgccacggcgatcctttttcaaaggagaactgccagggccacagatgcggctgggtgttggcgtagaggtgaaaaccctgagacttgatctgatcgatggcgtccggcgccggggcttcaatccagtccacctgcttcgacaacagcgccgcggtacgggcgttggcctccggcaaggggatcagcaccactttatccacccggggaatgcgatctttgttccagtagtcggggtttttatcgaggatcagctgctgacgcggcaccagcttctccagtttgaacgggccgctacccaccgcgtgggcggcgaaggcggtccacgcctgtttgctgcgcgcggcgctatctcccacgctggccggcaccgcgtcatactgcttctgccacgccgtcggcgagacgataaacaggttggtgatgttgtacggcagcagcgcatccggttccgaggtggtcagcgccacggtgtggtcgtcaattttctctgcgccggtgagggtcggcatgcgcgacagggtgttgccgatctgacccggggcgtactgcggcgccgctttattcagtaccttatccacgttccagacgatggcgtcggcgttcacctccgtcccatcatgaaacttcacccccggacgcagggtgaaaatccagcggctggtattctgcggatcgatgtgccactcggtcgccagccccggcaccagaccgctgggcttttcaccttgcgacagatcccactccaccagcgcgtcgtacagcgggatgccggtaaagcggttgccctcatagccttgatccggctggccaagggt

SEQ ID NO: 94 - DNA, 1287 bp, Klebsiella pneumoniae
atgatgattactctgcgcaaacttcctctggcggtcgccgtcgcagcaggcgtgatgtctgctcaggcgctggctgtcgatttccatggctacgcgcgttccggcattggctggaccggcagcggcggcgagcaacagtgcttcaaagcgaccggcgctcaaagtaaataccgtcttggtaacgaatgtgaaacctatgcggaactgaagctgggccaggagctgtggaaggaaggggataagagtttttatttcgatactaacgttgcctattccgtgaatcaggaagatgactgggaaagcacctctccggcgttccgtgaagccaacatccagggtaaaaacctgatcgactggctgccgggctccacgctgtgggcgggtaaacgcttctatcagcgtcatgacgttcacatgatcgacttctactactgggatatctccggcccgggtgcaggtctggaaaacgttgaccttggcttcggtaagctctctctggccgctacccgtaactcagaaagcggcggctcttatactttctccagcgatgacaccaaaaaatatgctgcgaaaactgccaacgacgtctttgatatccgtctggcgggtctggaaaccaacccgggcggcgtgctggagttaggggtcgattacggccgtgctaacccgcaggatgactatcgcctggaagacggcgcgtcgaaagacggctggatgtggaccggtgaacatactcagtctatctggggcggcttcaacaagtttgtggttcagtacgccactgacgcaatgacctcctggaacagcggccactctcaggggaccagcatcgataacaacggcagcatgatccgcgttctggatcacggcgcgatggacttcaacgatgactggggcctgatgtacgtggcaatgtaccaggacgtggatctggacagcaagaacggttctacctggtacaccgtgggtgtccgtccgatgtacaaatggacgccgatcatgagcacccagctggaaatcggttacgacaacgtgaaatcccagcgtaccagcgaaaacaacaaccagtacaaaattactctggctcaacagtggcaggcaggcaacagcgtctggtctcgtccggctatccgtatcttcgcaacctacgcgaagtgggatgaaaactggggctacagcaacacctccggtctgcagacgaaagacagcagcggaagcggcgctttcacctccagccgcggtgacgacagcgaagttaccttcggtgcccagatggaagtgtggtgg

SEQ ID NO: 95 - DNA, 1152 bp, Klebsiella pneumoniae
atggggtataaacgcgtgccggagccgccggccagaacaatacctttcatctttacttccttattagttattcagaccaaggcgctcaccggcataggagccgtccagcacgcgctgccaccaggtctgattgttcaggtaccagtgcacggttttctcaatcccgctctcgaacgtctcctgcggcacccagcccagatcgcgctgaattttcgcggcatcaatggcataacgcaggtcgtgtcccggacggtcggtgacaaaagtgatcaggtcagcaaagtgggtgatgttgcccggcttctgcgccaccactttgtcgagaatggcgcagatggtgcgcaccacatcgatatttttacgctcgttatgaccgccgatattgtaggtctcgccgctcttgccttcggtcgccactttgtacagcgcacgggcatggtcctcaacatacagccagtcacggatctgctccccgttgccatataccggcagcggtttacccgccagggcgttgagaatggtcagcgggatcagtttctccgggaagtgatacggaccatagttgttggagcagttggtcaccaccaccggcaggccgtaggtgcggttccaggcgcgaaccagatggtcgctgcccgctttggaggcagagtacgggctgctcggagcgtacggggtttcttcggtgaacaggtcatcggtgccgtgcaggtcgccgtacacctcatcggtggagatgtggtggaagcggaaggcctgcttctgcacgtccccaagtccggaccagtagtgacgggccgcctccagcatagtaaaagtgccgatcacgttggtctggatgaaggctgccggaccatcaatggaacggtccacatggctttctgccgccaggtgcatcacgatatccgggcggaactcgctgaactgggccgccacggcagcagcatcggtgatatcagtctgggaaaacgagtagcgttcgctcccggccaccggcgccagggattcgaggttgccggcgtaggtcaggcagtccatcacgcggacttcatcccgggtattttcaatgatatgacgaaccacggcagagccgataaagcctgcaccgccggtgacaagaatcttcatactttctctcgtttttcaatgact

SEQ ID NO: 96 - DNA, 1422 bp, Klebsiella pneumoniae
atgcctgatatttcaacgcccaacctcgactataacgacatggttgaggcatgggatattaatgatgcgctgatgggcggcacgctggaaatgcgccggcagggcaagaagtatctcccgaaatggccgaacgaagatcctgaaagttataaggagcgtttggcttcggcaacgttactccctgcctatgaagaggccattaaacaaaacatcgggcgagtgtttgctgagccgacggtactgagtgaggattctcctgaacaaatacgggagctgtcgccagatattgatatggaaggaaaccggctcgatgtctgggcacagcaatttttcaatatcggattccagtatggtctggtacatgcgctggtggatttccctaaaattgaccgggaggcagtaaaaactaaagccgacgaaaaagccgcgggatcccgcccgtatgccacgatgcttaatcctcgccaggtcatcggctggaaatcgaaagtggttaaagggaaagtggtgctgactgatctgcgtatcagagaggtcatcattgttgatggcgatgattatgggcaaacgaaagttgagcaaatacgccatatcatgccgggcaaggttgaaatttatcgccgaaataaaggtgataacggcgaaagccagtggcagattcacgacgagtgggaaaccagtcgcgatgatattcccctggtgacgctttatacgaaacgcacaggctttatgcgcggttcaccgccactgcttaatctcgccttactgaatatcaagcactggcagagtcagagtgaacaggacaacatcctgcatgtcgctcgcgtgccgttgctggtggcttacggtctggctgatggcgaaacgttgacgataggttcttcctctgcgactcgtttcgatgaccgccagcggcagggactggaatatgtcgagcataccggggctgcgattgaagccggtaagatttcccttgaagatctggaaaaccagatgcgtcaggccggcgcaaaactgctgcgcgcggaaaacacatcgactaaatccttagaccagactcacgaagagcggatgcaggagaattcacctctctacaccatggcaagctcgcttgaggatgcgctcgataatatcctgcagattatggcggaatggctgggcgagaaagagggtggcaatgtcgatgtacgcaccgaactggatgtttcagcccagacgtttgatgccgcagctgcaacagctgttcagtcgctccgtcaggggggggatatacgtcaggtcgatgctgttcgcgttttgcaggccctcaaatttatcgatccggatgcgaagcccgaagaggtaatcgacgagctgcgaaatcagcaggtcacgctggccggcggactgagtaacccgggtggtgcaaatggcaacggcgaa

SEQ ID NO: 97 - DNA, 2025 bp, Klebsiella pneumoniae
atgaacgaatttacgggatcggcagcttcacaggctgactttatttggaagaatgcggaagacctgtggggtgacttcaagcatacggactttggcaagatcatcttgccgtttaccctgctacgccgtctggagtgtgcgctggagccgacccgcgaggcggtgagagaagcgcatgacgctttcaaggatgccgatgttgagctggataccattctgcgctcaaccgctgaataccccttctacaacacctctgaatactccctcggcaccctgggtagcaccaagacgcgccgcaatctggaagactacatcgccctgttttcggataacgcccgcgctatcttcgaggagtttgagtttggcaatacggtgatccggctggagaaagcgggcttgctgtataagatttgccagaacttcgccaagatcgacctgcacccggacgtggtgccggatcgggtgatgagtaacatctacgaacacctgatccgccgctttggtgctgaggtcaatgaaggagccgaggacttcatgacgccgcgtgacatcgttcacctggcgaccgcattgctgcttgacccggatgatgccctgtttgaggccagcccaggtttgattcgtaccctgtatgacccgacctgtggcacgggtggcttcctcaccgatgctatgaaccatgtgggggactacggtaaccgcgacaagatcccgccagtgctggtgccgcacgggcaggagttggagccggaaacccatgcggtttgtgtggccggtatgctgatccgccgtttggagtcggaccctggccgagatctgtcgaagaacattcgtcagggcagcacgctgtccaacgaccagtttgccggtgagcgtttccactactgcctgtccaatccgcctttcggcaagaaatgggagaaggacaaaaccgctgtcgaagcggaacacaaaaaaggcgagctgggccggtttggtccgggcctgccgaaaattagcgatggctccatgctgtttttgatgcacctggcgagcaagctagaactgccgatcaacggcggtggccgcgccgctattgtgctgtccggttcgccactgtttaacggcggtgccgcgtctggcgaatcggaaatccgccgttggttgctggaagacgacctgattgaagccattgtagctctgccaacggatctgttcttccgcaccaatatcgccacctacctgtggattctgtccaacaagaagcctcaggagcgcaaaggcaaggtgcagttgatcaacgccaccgacctgtggacttcaatccgcaacgagggcaacaagcgccgtattgtcagcgatgagcagcgccgccagattctggacatctacgcagcaggcgaaaccggtgcgctttcccggatgctggactaccgtacctttggctaccgccgtatcagggtcctgcgcccgctgcgcatgaccctagagctggataaggtgggtatggagcggttggaagccgaagctgcctgggaaaagctctctgacgcgcatcagacattctggcgcgaagccctcaagccgctgatcgggcaaacgcagccctatagctgggcagaaacctttgttagcaactcgatcaagtccgatgaagccaagcagctcaaggtcaaatccaacaagacattgatcaccgcgctaatcaacgcctttggtcacaaagacccgaaagccgagccagtcacggattcaaacggcgagctggtgccagacacagatttaactgattacgagaacgtcccctatctggaggacatcgacgactactttgcccgcgaagtgcttcctcatgtgccggatgcctggctggatgagagctttaccgatgccagggatggtcaattgggccgcgttggctacgagatcaacttcaaccgcttcttctaccagtaccagccgccgcgcaagctgcatgatattgatgaagacctgaagcaggtagaagccgagattgccgcgctactggcggaggtggccagcgaa

SEQ ID NO: 98 - DNA, 1896 bp, Klebsiella pneumoniae; identical to SEQ ID NO: 16

SEQ ID NO: 99 - DNA, 1797 bp, Klebsiella pneumoniae
atgacgacacaggccccaccttccaacttgctgccgctcaacccggagcaactggcgcgccttcaggcggccaccactgacttcacgcccactcagctcgcctgggtatctggctatttctggggcgtgctgaatcagcagtccggcgcggcggtagccgcccccgccccggccgccgaggtaccgacgatcacgctgatttccgcctcgcaaaccggcaacgcccgccgcgtcgccgaagcgctgcgtgacgatctgctggcggcgaagctgaacgtgaagctggtgaatgcaggcgattataaattcaaacaaattgctgcggaaaaactgctggtggtagtgacgtccacccagggggaaggagagccgccggaagaagcggtcgcattgcataagttcctgttctctaagaaagcgccgaagctggacgggactgcgttcgccgtctttggtctcggcgatacctcttatgaatttttctgccagtccggcaaagatttcgacaacaagctggccgagctcggcgcggaacgtctgctcgatcgcgttgatgccgacgttgaatatcaggccgcggccgctgaatggcgcgcgcgcgtggttgaggcgctgaaggcccgtgcgccggtcgctgcgcccgctcagctggccaccagcggcgcggtgaacgatattcacaccagcccatataccaaagaagcgcccctgacggcgaccctgtcggtcaatcagaaaatcaccggccgcaattcagaaaaagatgtgcgccatatcgaaatagacctcggtgattccggtctgcgctatcagccgggcgacgccctgggcgtctggtaccagaacgatcctcagctggtgaaagagctggtggagctgctgtggctgaaaggcgacgagccggtgaccgttgagggtaaaactctgccgctgtcggaagccctgcagtggcattttgagctgacggttaacaccgcgactatcgttgaaaactacgccaccctgacgcgcagcgaatcgctcgtgccgctggtgggcgacaaagctcagttgcagcagtatgccgccgcgacgccgatcgtcgatatggtccgtttctctccagcgcagctggacgctgaggcgttaatcggtctgctgcgtccgctgacgccgcgcctgtattctattgcttcctcacaggcggaagtggagagcgaggtgcatgtcaccgtgggcgtggtgcgctatgaaattgaaggccgcgcccgggctggcggcgcctccagcttcctcgccgaccgcgtggaagaggatggcgaagtccgtgtctttatcgaacacaacgacaacttccgtctgccagccaacccggagaccccggtgatcatgattggcccgggcaccggtattgcgccgttccgcgcctttatgcagcagcgcgctgcggacggagcgcaaggcaagaactggttgttcttcggcaacccgcacttcaccgaagatttcctctatcaggtggagtggcagagctatgtgaaggaaggtctgctgacccgtatcgatctggcctggtcccgcgatcaacaacaaaaaatctatgtgcaggacaaactgcgcgagcagggggccgagctgtggcgctggatcaatgacggcgcccacatttatgtctgcggcgacgccaatcgtatggcgaaggacgtggaaaacaccttactggaagtgattgccgaatacggcgcgatggacgccgaagcggcggacgaatttttaagtgagctgcgcgttgagcgccgttatcagcgagatgtctac

SEQ ID NO: 100 - DNA, 357 bp, Klebsiella pneumoniae
cctccgcaaccaaatccaacggtctggcgatcagcatgccctactgggatgagcgggtggaagagatggccaaaaactatcccgaaattcgctgggacaagcagcatatcgatatcctgtgcgcccgcttcgtgctgcagccggagcgttttgacgtggtggtcggctccaacctgttcggcgatattctctccgatctcggcccggcctgtaccggcactatcggcattgcgccgtcggccaatctcaatccggagcgcaatttcccgtcgctgttcgaaccggttcacgggtcggcgccggatatttacggtaaaaatatcgccaacccgatcgccaccgtttgggccggggcga

SEQ ID NO: 101 - DNA, 321 bp, Klebsiella pneumoniae
tgctgctcggcctgctgggttgggataaatacgacggcaaggtggagtttatcaccgagctattcgccagctccggtaccggccaggttaacgccgtgttcccgttgccagcgcaggcgtaagggggccccatgccgcattttatcgccgaatgtaccgacaacatccgcgagcaggccgatctgcctgggctgttcgccaaagtcaacgaggcgctggccgccaccggcatctttccgatcggcgggatccgcagccgcgcccactggctggatacctggcagatggccgacggcaggcaggattacgccttcgtgcata

SEQ ID NO: 102 - DNA, 342 bp, Klebsiella pneumoniae
ccagtacctggaagtggatggcgtagagctgaagttcgtgaaaggcattttcgcgattttcggccatggcaacgtcctggggctggggcaggcgctggagcaggacagcggcgatatgcgcgtctatcaggggcgcaacgagcaggggatggcccacgcggccaccggttttgcccgccaggccctgcgccggcagattatcgcctgcacctcctccatcggtccgggagcggccaacatgatcaccgccgccggcaccgccagcgccaaccgcatcccactgctgctgctgccgggcgatgtcttcgccacccgccagccggatccggtgctccagcagat

SEQ ID NO: 103 - DNA, 378 bp, Klebsiella pneumoniae
aagatgacgagatggagttcggcgtcggcattcacggcgagccgggcatcgaccgccgccgcttcagctcgctggaccaaaccgtcgatgagatgttcgataccctgctggaaaacggcgcttacagccgcacgctgcgccagtgggataccgtcaagggcgcgtggcaggaagtacagcagagcaaaaccgcgctgcaaaacggcgaccgggttatcgcgctggttaataacctcggcgccactccgctttccgaactgtatggcgtgtataaccgccttgcccagcgctgcgaagcgtccggcatcatcatcgaacgcaacctcatcggcagctactgtacttcgctggatatggcgggcttctccatcactctgc

SEQ ID NO: 104 - DNA, 558 bp, Klebsiella pneumoniae
aaagccggacgtggggcgggtgatcacctcgctggtgctgatcgaaagtatcgccctgatcgccatctgtctgacgctgggcaaggtggttgcgcaactgctggcggggagcgtcttcgagctgccgaccttcgtctgcgtgctgtttatcggcgtgatcctcagcaacagcctggcgctggcggggttgtatcgggtgttcgatcgcgcggtatcggtgttgggcaacgtcagcctgtcgctgttcctcgccatggcgctgatgagcctcaagctgtgggagttggcctcgctggcgctgccgatgattattatcctggcggtgcaggcgctggcgatggcgctgtatgcggtgttcgtcacctatcggatgatgggcaaaaactacgatgccgcggtgctggcagccgggcattgcgggtttggcctgggggcaacgccgacggcgatcgccaatatgcaggcgattaccgaccgtttcgggccatcgcatatggccttcctggtagtgccgatggtgggggcgttctttatcgatatcgtcaacgcgctggtgat

SEQ ID NO: 105 - DNA, 75 bp, Klebsiella pneumoniae
cgacaacgcgctgctggcgctggcggcggcggtggagcaaggctccagccacccgctggcgcaggctatcgtccg

SEQ ID NO: 106 - DNA, 363 bp, Klebsiella pneumoniae
ggtttaccgacgttcgcttcaacgttgaattcacgcttcatacggtcaacgatgatgtcgaggtgcagctcacccataccggcgataatggtctggttagactcttcgtcagtccatacgcggaaagacgggtcttctttagccagacgacccagagccagacccattttttcctggtcagctttggttttcggctcaacggcgatggagattaccggctcagggaattccatacgctccagaatgatcggcgcatccgggtcacacagggtgtcaccagtggttacgtctttcagaccgatagcagcagcgatgtcgcccgcgcgaacttctttgatctcttcacgtttgttagcgtgcatc

SEQ ID NO: 107 - DNA, 648 bp, Klebsiella pneumoniae
accgccgctgcaggtggccccgtttctgctggaagagcagctggcagacgatgtggaagccacccattttgctctgctccaccgccagcaggcccagtgcgagatcgtcgccgtacagcggcaaaaaatgcgcgactggctggcgcgctgcgaatcgctctccttacagcccctggcgttgacgcccgacgtgctggccctgccctggcaaccgccggcgtggagcgcggtgcaggtggacgagcagtggctgatccgccaccagccgtggggcggcatggcggcggaaaacgtctggctgacggagctgctgcagagcgaggcggaagagcacgtcatcgacagctattcgccgccgcccgcggcgccgggcgtctggcgggagcagcctgcgcagacattgctgacccttgccgcacgccatccggcagcgcagaaactcagtctgctgcagggggagttcgccgtccggcggcggtctgcgcaggcgagctggcgtccggcgcggtatgccgcgctggctctggcgttactggcaggggcaaacagcgtgctggaccatcgcgatctggcgcgtcaggccgaggcggcgcaacaggccagccgggccttctatcaccgctggtttccgacggagaaaaaggtgat

SEQ ID NO: 108 - DNA, 168 bp, Klebsiella pneumoniae
aggcgccgcggccttcctgcgtcgccatgctcaggaagagatgacccatatgcaggggctgttcgactatataaccgacaccggcagcctgccgcgggatcaacgctatcgcctccccgtttgccgaatatgcctcactcgacgagctgttccgccagacctacgagc

SEQ ID NO: 109 - DNA, 213 bp, Klebsiella pneumoniae
aagcaccctgctgaagatggtcgccggcctggtggagcccagcgacggcaagctgatgctgtggcggcgcgacagtcgggaaaaggcccagcatccgctgtcgttcgtcttccaggaagccaccctgatgccgtggagcagcgtgcgcaacaacgtcaggctgccgctggatctggccggcgtgccgcgggcggagggcaatacccgggtgaa

SEQ ID NO: 110 - DNA, 294 bp, Klebsiella pneumoniae
tctcgtccagacgcggctgctgggtctgctggcgattgcgctgctctgcggcgcggcggtggcggtggccgggccgatcggctttgtcgggctggtggtgccgcacgtggtgcgccgtctggtgacggaagatatccgcctggcgctgcccctggctgcgccggtgggagcgctggcgctggtgctggcggatatcgccgcccggacgctggtcgcgccgcaggagctggcgaccggggcgatgaccgccctggtgggtgcgccgttgtttatctttatcgccgcgaggttttt

SEQ ID NO: 111 - DNA, 123 bp, Klebsiella pneumoniae
ccttccggtttcagggtagctttgttgaagttgaacagaacgtcagacttcagggtgaagtgcttggtagccacttccggagccggagccggagccggagcaacaaccggtgcagcatcttcc

SEQ ID NO: 112 - DNA, 444 bp, Klebsiella pneumoniae
gctgcgtaccccgctggcggtgctgcgcggcgagctggaggcgattcaggacggggtccggcgctttacccccgagtcgattccttctctgcaggccgaggtggctaccctcaccaagctggtggacgacctccatcagctgtcgatgtccgacgagggggcgctggcctaccagaaaacctcactggatatcatcaccctgctggaagtggcggcgggcgcttttcgcgagcgcttcgccagccggcagctaagcattcaggtgtcgctcccggagcaggcgatgatcttcggcgaccgcgaccgcctgatgcagctcttcaacaatctgctggagaacagcctgcgctataccgacagcggcggcagcctgcacattaccgcccgccgcagcggtcgcatgctggtgattgtcttcgccgacagcgcccccggcgtcagcga

SEQ ID NO: 113 - DNA, 306 bp, Klebsiella pneumoniae
agcgctgtggcgtcttgccctccctatgattttctccaacatcaccgtcccgctgctggggctggtggatacggcggtgatcggccacctggacagcccggtatacctcggcggcgtagcggtcggggcgacggccaccagtttcctcttcatgctgctgctgttcctgcgcatgagcaccaccgggctcaccgctcaggcctggggcgccaaagatccgcagcgcctggcgcgggcgctggtgcagccgctggcactggcgctgggcgccggggtgctgattatcctgcttcgcctgccgctaat

SEQ ID NO: 114 - DNA, 159 bp, Klebsiella pneumoniae
accgttcttcaccaccaaagccaccggcagcggcagcggcctggggctgtcgatggtgtatggctttgtgcgccagtctggcggccgggtggcgctggagagcgcgccggggcaggggacgacggtgcggctgcagctgccgcgagcgttgaccgaggt

SEQ ID NO: 115 - DNA, 345 bp, Klebsiella pneumoniae
tggcctgctcggcaccggtctgcgcagtgcgccgcgcgatcccgttgcggcgctcatccaccaggcgaaccaccacccggcgccggtggtggcgctggatatcccttccggcctgaatgcgcagacgggcgcgacgccaggtgcagtggtacaggccgaccatacgctgacctttatcgccctcaagccggggctgctgaccggcaaggcgcgggatgtcgtcgggcaactccaccatcatgcgctggggctcgaacgctggctcgccggacaaagcactcctctgacgcggttttgcgccgcccacctcgccgactggctgccgccgcggcgggccacctccca

SEQ ID NO: 116 - DNA, 93 bp, Klebsiella pneumoniae
tgcagggcgcttcgtggttcagtcagaacagtcagaaacaacgcaatccgcagctggaagagctggcccgcacgctggcgcagcaggtggtgc

SEQ ID NO: 117 - DNA, 267 bp, Klebsiella pneumoniae
gccgtctacccgtttcgtgctggagtttatgggggaagtgaaccgcctgcagggggtcatccgcggtggacagttccacgtcggcgcccaccgctggccgttaggctataccccggcataccaggggccagtggacctgttcctgcgcccgtgggaagtggacatcagccggcggaccagcctggattcgccgctgccggtgcaggtcctggaggccagtccgaaagggcactacacccaattagtcgtccagcctctggggtggta

SEQ ID NO: 118 - DNA, 210 bp, Klebsiella pneumoniae
gcgtccggtgacccggctggcggtgctgccggtggcagcgaaggccagcgtggagcaggggctggaggcggcgctggagagcgccctggcgcactggctatatcacgacgagatctggctgcgcggcaacgcaaaagccaaagcggaaattctgctggcgatagcccgcgtgcgccatgccctcgtgctgtttggcggcatcgtgccgcg

SEQ ID NO: 119 - DNA, 144 bp, Klebsiella pneumoniae
ttcgcgaagactaccgcaagaagtgcgtggcgctggccgatgcgctggaaagccgccttggcgagcacctggaattcagccgcccgcagggggggatgttcctgtgggcgcgtttccgctatccgttcgataccatggaatgga

SEQ ID NO: 120 - DNA, 168 bp, Klebsiella pneumoniae
actgcaccggctcctgcagctggaaaatttacgtcaaaaacggcctcgttacctgggaaacccagcagaccgattatccgcgcacccggccggatctgccaaatcacgaaccgcgcggctgcccgcgcggcgccagctactcctggtatctctacagcgccaaccgcc

SEQ ID NO: 121 - DNA, 321 bp, Klebsiella pneumoniae
ggagaaggcgatgtcgatattaattgcatttttgggcggaatgttaaccctgctgagcccctgtacgctgccggtgatcccgctgctgttcgccagcgtccggggccgccgggggcagctggcgatcatgctggcaggaatggcgctgatgttcggcgctgtctcctggctggtgacggtcgccagcggctgggtggtgaatctgacccttgcaggccgcggtctggcgctggcgttcttcgccctggtcgggctgagtctgctttcgcaacgcgtcgcgcaacggctgacctcacccctggtagcgttggggaatcagct

SEQ ID NO: 122 - DNA, 141 bp, Klebsiella pneumoniae
tccgccgatgcccgctccggcaccctgccgccgcggcgtcgaacgtctggtttatccgggaggcgatacggcgctgctggtcttcattccgctgccggatggcgcctcgctggcggccctgcggctgctggcgcagcattg

SEQ ID NO: 123 - DNA, 183 bp, Klebsiella pneumoniae
tctgagcgcagggatatcttcattgctgctggaggcggcggttgccgggtgcggcattgcgatgcttcccgaactggaggcccggggcgcgattgccagcggcacgctggaggtggtgcttccggagtggacgccgaaggcgttgagcgtttacggcatctatctttcccgcgactaccaacc

SEQ ID NO: 124 - DNA, 249 bp, Klebsiella pneumoniae
gcgccggtttcaacgccagcaccagcaaaacccagcggccgttcagccagtcgccgatccccagcgtttacagcgagatcatgcagccggaggcagacagccgcagctacaccctcggcggctttgtccaggataagatcaacttcgaccttgatagccacaacttcgccattattcccggcgtgcgcgtggtgcatcaatcgactaagccggaaaatctgtccgaccttgccgccaacagcagcgtac

SEQ ID NO: 125 - DNA, 453 bp, Klebsiella pneumoniae
tccgctgattgctctgctgcgcccggtcagcccgctggcctggctgccgattggcctgctgctgttccagaaggcggagccggcttccagctggaccatttttatctgctccatctggccgatggtgatcaacaccgcggagggtgtgcggcggatcccgcaggactatctcaacgtcgcccgcgtcctccagctctcggagtggacggtgatgcgcaaaatcctctttccggcggtgctgccggcggtgcttaccggcgtgcgcctctccatcggcatcgcctggctggtgatcgtggcggcggaaatgctcaccggcggactggggatcggcttctggatctggaacgagtggaacaacctcaatgtggaaaacatcatcatcgccatcgtcattatcggcgtcgtcggcctgctgctggagcagggcctgatgctgctcgctcgccgctt

SEQ ID NO: 126 - DNA, 267 bp, Klebsiella pneumoniae
ccgccaccgtcttcagcccggagctgcaaaattccgcccgccgcgacggccaggaaatccagcttaaagccctgcagcagtactggcagctggcgctggcccccgggatgcagcgcgcagtcaatcaggcggaagtggcccaggatgtcgccgactttgtcgatcgtatcgaccagttggtcaccgcattcgaccacaccaccgagcagcgtatcgaacgggtggtctggatctatcgcatcctcgccattggtatggcgctgctgc

SEQ ID NO: 127 - DNA, 135 bp, Klebsiella pneumoniae
gtcttttcgatttcctctacctgttcgcctggtcgtcgaccatggctttcttcgttatctggaccacccagcatcttggcatcagcgccacgaagaccgggctgctttactcggtcaacgcctttatcgccctgc

SEQ ID NO: 128 - DNA, 114 bp, Klebsiella pneumoniae
ttaccgcgggcccgacccgtgagccattggatccggtgcgttatatcaccaaccacagctctggcaagatgggcttcgcgattgccgccgccgcagcgcagcggggcgcgaatg

SEQ ID NO: 129 - DNA, 96 bp, Klebsiella pneumoniae
attgctgtatgcccggcgggaaatgctcccgttggtcagcaaccatcgcactcgcattttcgaggcgataatggccggggagccggagcaggcgcg

SEQ ID NO: 130 - DNA, 309 bp, Klebsiella pneumoniae
cagcgaggcggtggctgccgccgtggcgtcgctgcccgccgatttcgccgatatcaccaccctgatcaacaacgccgggctggcgctgtcgccgctgccggcgcaggaggtggcgctggaggactggaaaacgatgatcgacaccaacgtcaccggtctggtgacagtcactcacgccctgctgccgacgctgatccgccatggcgccggggcgagtattatcaatatcggctcgatcgccgggcagtggccctatcccggcagccatgtgtatggcgccagcaaggcgtttgtgaagcagttcagcta

SEQ ID NO: 131 - DNA, 153 bp, Klebsiella pneumoniae
tgtgccctcccagtcgctggagcacggcatactcaggttcacgctgcactatggcaaagtgggcgctatcgactatgccgacggctcggacaccacccgcctgtggaattccctgcccacctcttccggtactatcctgcgcttaagcgacct

SEQ ID NO: 132 - DNA, 315 bp, Klebsiella pneumoniae
cggtcaggcctcaatgggcatgatggtcgccgggctggcgatgatgggctttgccgaactgtttatcgacccggtggcgatggcgcaaatcacccgtctgaacatgcccggcgtcaccggcgtattgaccggcatttatatgctggccaccggcgcggtggccaactggctggcgggcgtggtcgcccagcaaaccaccgaatcgcaaatcagcgatacggcgattgccgcctatcagcatttcttcgcgcagatgggcgaatggactctcggctgcgtggcggtgatggtcattatcgcctttgccgcggcctg

SEQ ID NO: 133 - DNA, 246 bp, Klebsiella pneumoniae
gctgttcagccggggacgcggcgccggcgcgccgctggcgtggcaggtatggggcggcagttttcatatggatcgctggtcagagagcgggaaaaagacccggccggcgaaagagagctggctggcaggcctttcggcctccgggtcgctcagcaccctgagctgggcggctacgggctatggctacgacaaccaggcggtgggggaaacccgcctgacgctaccgctgggcgagtcgatcaacgt

SEQ ID NO: 134 - DNA, 108 bp, Klebsiella pneumoniae
gccatcacgctggggaaaaatggatacgctgggcctgttgttcagcatcgggatcttctttctccagccggtgcaaaaccttgcctggggcggtgtattcaaggtgat

SEQ ID NO: 135 - DNA, 168 bp, Klebsiella pneumoniae
ataccctcgcctggcaggggcaggcggggcaacaaagggaggggctgtcggacagccttattaaatcggccaaagatctggtgggcgggaaagacaagccggtcatcgaccagtcggcagccggcccgcaggggcctctggatgacacgttcggcccactgctccagc

SEQ ID NO: 136 - DNA, 405 bp, Klebsiella pneumoniae
ttgccatcgaaggcaccttccagggcggcagtatgggcgaagtctccggcgccaaaatggccgccgcgctggagctggcggcggaagataaccgcaacggtatcccgacccaggcggtgctgtgcctcgaaaccggcggcgtacgtctgcaagaggccaacctcggtctggccgccatcgccgatattcatgccgcgattgtcgacctgcgccgctacaccccggtggtcggcattattaccggtaccgtcggctgcttcggcggtatgtccatcgccgcggcgctgtgcagctaccttatcgtcacccgtgaagcccgtctcggcctcaatggcccgcaggttatcgagcaggaagccggcattgaagagtacgactcccgcaaccgtccgtttatctggagca

SEQ ID NO: 137 - DNA, 273 bp, Klebsiella pneumoniae
cgctgcagggttcgcgcgcatcgctgctggttgaggatgacggcccgggaatcgcccccgaggagcgcgagcgggtgtttgagccctttgtccgccttgaccccagccgggaccgggcgacaggaggctgcggcctcggcctggcgattgtccacagtatcgcccaggcgatgggcggcgaggtgcgctgcgaggccagccctctcggcggcgcccgcttctgctttagctggccggtctatcatcagctgcctgatttcacctctgcctgaa

SEQ ID NO: 138 - DNA, 138 bp, Klebsiella pneumoniae
cgatcttcagccgctggcccgggtggtcggcgtggcgacagcgggcgttgcgccgcggatcatgggctttggcccggcgccggcggtgcgcaaggtgctggcgcagaccggcctgacattaggccagatggatgtcat

SEQ ID NO: 139 - DNA, 135 bp, Klebsiella pneumoniae
attgttaaatatcagccgggccgatcaggacgctttcgcctggcgcagccagcagcgcacggcgcaggcccagcgcgacggcattctggcgcaggagattgtgccggtgcagattgtcggccggaaaggggcggt

SEQ ID NO: 140 - DNA, 192 bp, Klebsiella pneumoniae
aggcattatgtcgccgtggctcggcgcccagggcatcgtcccgcagtccgacgacggtatggtggtcgccaaaggcacgatcaacggccagcctgcggtggtgattgccatcgaaggcaccttccagggcggcagtatgggcgaagtctccggcgccaaaatggccgccgcgctggagctggcggcggaaga

SEQ ID NO: 141 - DNA, 267 bp, Klebsiella pneumoniae
gcgcggcgaggcgctggaggccaccctgcgcctgcgcgaggagctggccgaacagcggcgcgcgctgctgctgatgcaggagatggcggcccgctacggctgcgatatctctcacccggcgcgcactgcccgggaggcggtgcagtggctctacttcgcctacctggcggcggtgaagtcgcagaacggcggcgccatgtctctggggcgcacggccaccttcctcgacatctatatcgaacgcgatctgcgcgccggtttattgaa

SEQ ID NO: 142 - DNA, 183 bp, Klebsiella pneumoniae
ttaactgcggctcgtcgtcgatcaaattttccgtcctgggcgccgccagctgcgactgcctgctcaacggcgtggccgagggcatcaacgcggaacgggcgtctctctcgctcaacggcggcgagccggtggcgctggcgcagcgcggctacgaaggcgccctgcaggcgattgccggggcat

SEQ ID NO: 143 - DNA, 288 bp, Klebsiella pneumoniae
gcgttttctggctcaccagacgcttattaccgcgatcagtactgcagcctggctggcgccggcccaggtgctgaccgttaccgacagcctgccgtcgaccctgcctgcgcccgtacaggatccgctgttaatcaccggcaccggttttaccgccagccgccgggaggcgctgcgggtgtccctgcttgcggtgccctacagcgaaacattgtgctggcgtccgccgctgctgccgcgcccgaaggtgactggcaccatgacggcgcgggtgaccagcgcgaaagcgaa

SEQ ID NO: 144 - DNA, 456 bp, Klebsiella pneumoniae
ccgagggagcgaaggtggaagttgtcaccgccagcagcggcgagcaggcgcagcccgccccgcgccagagcggtaaacacggagcgcgttcctgatgcaggtgttacctccaggccgcaccggcggcccgtcccggctgtttattatgcgtccggtggccaccactctgctgatggtggctatcctgctggccgggatcatcggctaccgctttctgccggtctccgccctgccggaggtcgattacccgaccattcaggtagtcaccctctatccgggcgccagcccggacgtggtgacctccgccatcaccgccccgctggagcgccagttcggccagatgtccggcctcaagcagatgtcgtcgcaaagctctggcggcgcctcggtagtcacgctgcagttccagctgaccctgccgctggacgtcgccgagcaggaagtgcaggcggccat

SEQ ID NO: 145 - DNA, 354 bp, Klebsiella pneumoniae
cgtcggcattttgaatctcacttcggcgtgccccctccgaatggcgcaaaacatttcgtggtatggcatgatagcacccgaagagagtcaattcagggtggtaaatgtgaaaccagtaacgctatacgatgtcgcagagtatgccggtgtctcttatcagaccgtttcccgcgtggtgaaccaggccagccacgtctctgcgaaaacgcgggaaaaggtggaagcggcgatggcgcagctgaactacattcccaaccgcgtggcacaacaactggcgggcaaacagtcgttgctgattggcgttgctacctccagtctggccctgcacgcgccgtcgcaaattgtcgcggcgat

SEQ ID NO: 146 - DNA, 201 bp, Klebsiella pneumoniae
cggactcagaagccttcccgggtcttatccggcagactcacagaaaaatcagggcagcatcggcagacggcgcttacgacacccggctctgtcacgatgaactgcggcgtaagaaaatcagcgcgcttatcccaccccgaaaaggtgcgggttactggcccggtgaatatgcagaccgtaaccgtgcagtggctaatcagc

SEQ ID NO: 147 - DNA, 426 bp, Klebsiella pneumoniae
agcgttcccctttccagacccgatccagcgccagttgcgagtaggccgccagcagatcgctgcggccacgatggtagtattcgcgcagaatccgccacagatagttcacgtccgatgccgccagatttaatcctttcgccccggttggcggaacgatatgcgccgcatcccccaccaggaacaaccgcccatattgcatcggctccacgacgaagctacgcaggggggcaatgctcttctcaagtgagtgaccagtcactaacctggatgccagctcctccggcaagcggcttttcagctcctgccagaagcgctcgtccgaccatgcttcaaccttatcgctcagcggaacctgcagataatagcggctgcgggtcagtgagcgttgactgcacaatacaaacccccgctgatggtgcgcataaa

SEQ ID NO: 148 - DNA, 573 bp, Klebsiella pneumoniae
cccgctggcgagcaccgtctgcaccggttcactctccagcagacgggcgaactgggcgcgaacgttggcttccaccagggcgtccagcgcatggcgagaacgctccgcgttggcgctggcgctggtgctggcgccgggggaggccgcaatacaacagtcatcggcgatctgcacaatttcgtgatgcagggtgtggcgcagctggccgatgcgacgagccagcgccgaggactcctgcgccagcggcagggtgggcagagagagcgccgcctgtacgccgccgcagccgtagtggccgcagagcaccacccgctccacctcaaggtagtggagggcatactgcaggacgctcatgacgttgtcgtcggcagggtcgagcatgttggcgatattgcggtggacaaagagctcgccgggctggctgccggtgagcacctcggcgggcacgcggctgtcggagcagccgatccacagcgagtggggccgctgcccgtcgatccatttttcgaaatagtccggatcatgctgacacttctgcagcgcccagctgcggttgcgggccagcaaaggttt

SEQ ID NO: 149 - DNA, 132 bp, Klebsiella pneumoniae
gcgcgatatccggccccggcaggcgggtcttcagcacgccccccagccagtcggtcagcaccggcgcccactgcgcgtcaaacccgctcagctgcagcttctccgccatccacccttccggcaccggctggg

SEQ ID NO: 150 - DNA, 798 bp, Klebsiella pneumoniae
cgatgtccagctcaccggccgtcagccggctcacccgccagcccgtgggcaattgctcatccatgcgtacccgtcgccactttccgttcccatcctgcagaaaccccgtccagccagcatcatccccaaccgccccgccatagcgccattgcgaaagctgcgccgtgcggcagggatcctcaaccggctggaaagggtcacgctcggccgccagcagcgacagcggtagccacaggaagatccagcgtttaccgctcatcttccgcctccagcagcagtcgcaggcggagcgtctgcgcctcacggcccagcgaaaacgaacgcggattcatcccgcagcgcgccagccaggaaaaaagcgcgggtaccgttgaccaggacagggtcagctccatctcgccgccgcttccctgcggacgccaggcgataagcttcgctccggagagcggaatggctatgggcgaaaatgactgcgtgtcgatgcgcgccccgggattttcctcgccggggatgcgcagcgccatgatccgccgccactgcgtttgcaacgccgcatcacgggttaccgccgcctgcggagggcgcagatcgcgccagagcgccacgccgcctcccgacagccccattgcgagcaggatcggcagccccgtccaggtgccccgaaggttaatccgcatcagcgcgcgctcccgtcagggtaaaactgaactgccaacgcccctcggcgtcgcgctgggtcccgccggcttttgccggcgcgaatcccgcgacgcgagtcagcgcagcctccacgctggt

SEQ ID NO: 151 - DNA, 516 bp, Klebsiella pneumoniae
aaatcaaaaagtttacgccgcaagcaactctttcgcgttcgccagggtgttgcgcgtgacttcgctgccgcccagcagacgggccagctcctgcaagcgagcacgtttatccagcggctgcatatgggtttcggtcatctcgccatcggtctctttgcagacaaagaaatgatggtggccgcagcatgcgacctgcggcaggtgggtcacgcacatcacctgcgtggactcgcccagctggcgcagcagcttgccgaccacggcggcggtcgggccgctgatgccgacgtccacttcgtcgaagatgagcgccggggtttccattttacgcgcggtgatcacttgaatcgccagcgcaatgcgcgacagttcgccgccggaggccactttggcgattggctgcagcggctgaccggggttagtggtgacgcggaactcaatatggtcggcgtcggcggtgagatggcgttcatcgaacgcgacctcaatcgcgaagaccccgtgcggcatcgaaag

SEQ ID NO: 152 - DNA, 330 bp, Klebsiella pneumoniae
ccgccggccaacagggtgttgatcagcgtcggggaacccggctgcgccagcccgacatggcccagctcagcatccagctgcgtcaccttcacgctatcgccatcgccgaggaacaggcctaccgaggaaataccatgttttttcgcccacgccagcagcgtcttgttggcggttcccgccagcgcgccggtgatgatgtcgatttgctcagccggcgtaacgcgcaggccatttttcttctgcaccggcaggttgagctgcttcatcagctcatccaccacgcagccgccgccgtggacgataatcagcggacgctggtgcgcttcacgg

SEQ ID NO: 153 - DNA, 1401 bp, Klebsiella pneumoniae
cgccagcatctccgcggcctgggtcgaatcgggcaccaggatcggatccactttcccgcgaccgcgaatggtgcggcacagcgagcggctgtcggcgcccgggatcggcgcttcgcccgccggatagacgtccagcatcagcagggcatccacctgggtcagcacgttggcaaaatcatcatacagatcgcgggtacgggtataacggtgcggctggaataccatcaccaggtttttatccggccagccggcgcgcgctgctttaatggtggcgtccacttccgtcgggtggtgaccgtaatcatcgatcagcatcgcgctgcccggtttgccgttgacttcggccagcggaaactcgccaagaaaatcaaagcggcgtccagttccctggaagctctccagtgcgcgcagaatagcccgatcgtcaatcccctcttccgtcgccacggcgacggccgccgccgcgttcagcgcgttatggcgtcccggggcattgagcgtcacctgcaggatcgctttatcctggcgcaccaggcggaaatgcccctgcgccccaacctgacgatagtcctcgacgcgtacgtcggcgtcgtcgctaaaaccgtaggtggtgatctgccggccaacgcgcggcaacagttcccggatcaccggatcgtccacgcacatcaccgcgcgtccgtagaacggcaggttgtgcaggaagttgataaaggtctgcttcagattctcgaagtcgccatggtaggtatccatgtgatcggcttcgatgttagtgacaatggccaccatcggctgcagatgcagaaacgacgcgtcgctctcatccgcttccgcgatcaggtaacggctatggccaaggcgggcatgtacgcccgccgcttttaccagcccgccgttgacaaaggtcgggtccagcccggcctcggcgtaaatgctggataccatcgcggtggtggtggttttgccgtgggtcccggcaatggcgatcccgtggcgaaagcgcataagttccgccagcatttcggcacgacggatcaccgggatacgcgcctcatgcgcggcaacgatttccgggttatctgccgaaatcgcgctggaaacgacaaccacgctggcatcacgcacgttttccgggcgatggttgaaataaatggtggcgccaagctgcgacagctgctgggtcaccggattcggcgccaggtcggagccgctgatctggtaaccttcgttagccaacacttcggcaataccgcccataccggcaccgccgatgccgacaaagtgaatgtgccgaacgcgacgcatctcgggcactatggaacgcagttttgccaaatcttgtgtattcattctttacgccatcaacttctgtattcgggcggtgaaaatcaccgcaat

SEQ ID NO: 154 - DNA, 747 bp, Klebsiella pneumoniae
tctagactgcagcggtgtcaaaaaaaacgggagccttcatgctcccgtttttattttgccgtgctgcccgcagcgctagctcgcggaggccagcagaccatccgcgcggaacatcgccttgataccgcggatcgcctggcgcgtacggtcccggttctcgatcagggcgaagcggacgtgggtatcaccatagtcgccaaagccaatccccggcgagacgcaaaccttcgcttcattaagcagctttttcgcaaactccagcgaccccatggcggcgtaaggttccggtattttcgcccacacgtacatagacgctttcggacactccaccatccagccggcctcatgaagccctttgaccagcacatcgcgacggcgcttatactgttcggcaatatcgcgcacgcactgctgatcgccctccagcgcagctatcgccgccacctgcagcggagtaaaagtcccgtagtcatgatagcttttgatacgagcgagggcattcaccaaagtcttattacccaccataaagccaatgcgccagccggccatgttatagcttttcgacagggtaaagaactcgacggcgacatcccgcgcgccgggcacctgcatgatggagggcgctttccagccgtcatacacgatatcggcataggccagatcgtggacgaccagaatgtcatactgcttcgccagagcgacaaccttttcaaagaaatccagttcgacgcactgcgcggtcggatt

SEQ ID NO: 155 - DNA, 246 bp, Klebsiella pneumoniae
cgttacgctcaatcagcttctccactttctcaaagccgagcatctcaaacagcgcgtcatacagcgggcgcagatacgggtcgaccttctggctcagatcgccgggcaggaagccgagcttttcgcctgcctcgacggccggacgggtcagcagaatacggcggatctcctggcgctccagcgcatcgaccgccgccgccaccgccagataggttttacccgtacccgccggacccacgccgaaag

SEQ ID NO: 156 - DNA, 792 bp, Klebsiella pneumoniae
gagtgctgcgacgaccagttagcgcaggagttgccattcaccaggtggatatcgatatcacgcggattgagcagcagacgcgccttgttgaccggcggccgcgattccatgctcgacagcgccaccagcgccacgcaggtgcccagcgccaacaggaacagcccccacaccagggcggtagtgaggcgcttgcggcctgacggcgcgctggccacggtaggagccggtggcggcgcggcggcatcagggagagggacagagacgtcggatggcgcaccggcggccggcggcgcaggaacggcggtcgacggcgaaggcgtcagcgcctccatcgacggggctagctcctccccctcttcggtgcaccagatcaccggcaccgtgagcttatacccccgtttgggtaccgtcgcgatgtactcaaggctaacgtcgtcgccgtctttgagcgacttgcgcagttcagaaatactctgcgtgacgacgtggctggtcacaacgttccgggtccagacgttttcgataagctcgtcccggctaagcacttcccccggatggcgggcaaaaaagaccagaagatcgattaaacgcggttcaagggtaagctggcgccccttcctgctgatttggtttacagagggggttaccagccattcaccgacgcgaacaacaggttgtagcatacaagaaagccccagacaaaaagggaaaggcgcgatgataacacatttgtcctacctatttttgccaggggtcactccctcaggcattaggccggaattggctctttat

SEQ ID NO: 157 - DNA, 762 bp, Klebsiella pneumoniae
cagatcaaactccggcagacggatcatcatcacgatgccgtaggctcccaccttcttctggtcttccagcagcgtggccagctgattgtcaaaaaacaggcggttattcagtccggttttcgaatcctgcgccgcgtaggagcgaataagcgtatccatccggctgcgctgatcgctggcgaactgcagctccgacagcagcatatccagcgcgctactggtgctggccggccattcatagaccgacccgcgcacctgcggcccgcgctcgccgctcaggatacgcgtggaacgcagctccagcagctcctggccggccagctggcggcggatccagcggacggcgaagaaaataatcaccaccatgaagccaatggagatcgacagcggggcagtgatcgacagcgaacggaaatagttcaccatcgggtcaacgtagaccagatgcagcgtaatgccaggatgtttaagcgacggaaccgtgatctcacggaattgctcatggctgccgagcgggcgatagctatcgggtcgggaatggctgtagagcggtttgccgttgagcatgaaatcgatatgcacgatctcgatcggcgtcatcagctcatccaactgcggttcaagcttatcgaaagaggtggtgatgagccggttatccagcatggtcgccaccgcctgaacgcggttttcgaccttgttctcaatgccgttataaaaactcagcgaagcgccaatcagcgtgacaaagatggtcaggctagt

SEQ ID NO: 158 - DNA, 858 bp, Klebsiella pneumoniae
gacttcggcagcgtcggctttcaggccggcggcttccagcgcgtcgcgcacagcgcccatctcttcccaggcggtgtagacgtcgatggcgccgtcgtcataggtcaccacgtcttctgcgcctgcttccagcgccgcttccatgatagtgtcttcatcgcctttctcgaaggagataacgcctttcttgctgaacaggtaggagacggaaccgtcggtgccgaggttacccccggttttggtgaaggcgtgacgcacttccgcaacggtacggttacggttgtcggacagacattccaccatcaccgcggtgccgccaggaccgtagccttcataaatgatggtttccatgttcgcgtcttcatcgccgccgacgccgcgcgcgatggcgcggttcagggtgtcgcgagtcatgttgttagacagcgctttatcaacggccgcacgcagacgcgggttggaagccggatcgccgccgcccagacgcgcggcggtgaccagctcgcgaatgattttcgtaaagattttaccgcgtttggcatcctgtgccgctttgcggtgtttggtgttggcccatttactatgacctgccataaaaaactctccaaaaagcgcgccctttcaggcggcgttaattacaaattcttcaatcgcctgccggttgctccacgacttggtcagcgcagcggcttccgtcgcgctgacccagcgataggccagatgttcggtgaaagtaatctcccgctcatgaggcagcgcaagacagaaccagaattccgtattgcgctctacacccggcgcatagcgatgacgcaaatgagaaaatatctcgaactccaccgtgcgctgacagtcgat

SEQ ID NO: 159 - DNA, 153 bp, Klebsiella pneumoniae
tcactcgctgctggcgccgttcgcgttcgtccggcggcagctgctttccgccgccgagcaggcgatcgcgcagatgggcgtcggccttcgccagctccggcaccggcggctggtgcgagagtccgcccgagccgaggatcagcacccgcttat

SEQ ID NO: 160 - DNA, 300 bp, Klebsiella pneumoniae
tttatagccctggcgcagagcctcaataccggcctcgctctgcgcgtcatgcccatggatcaccatcagcgccttgctctgctcccgcaccacctgaccattctggccaagccactggccgtgggcatcaaacaccgtcagcccgtcgcgaaagcgcggcgtgacgtcacggtcgacaaactgttgccactcttcagcggtgatgtctttccccgccgggcggctcagaccgaagtaaagcgtggtttgcaccatggacttatccgccgggcagacgccgggcttcggcgcgctggtcga

SEQ ID NO: 161 - DNA, 204 bp, Klebsiella pneumoniae
gcgtcggaattcggccagcccccagccatagcgttggcagatactgcgcgatgctcactgagaagcccaccgccagggcggtcagcagtgggcgagttagcgaaggcagggttagcaaccagaaaatacgcgtggatccccagccgagcgtgcgggcgacaaccgtcagccgcggatcgcgctggcgccaggccgggcgcaaaa

SEQ ID NO: 162 - DNA, 321 bp, Klebsiella pneumoniae
atgtcgaatgaccgcgtccggcggtcagccgcttcgcttactttttgttcatcatcgctttcagatcggcaaacgggttgtaggtggcctcgccgacgctcttttgcgcatcttcccctgccaccaccgtggagccatactgatcggcttcggtgtacttggaatgttcgtgatcgtgacagtacaggcacaacatctcccagttgctgccatcttccgggttattggagtggtcgtgatcgatgtggtgcaccgtcagctcgcgcagattggagtagacaaactcccgtgagcagcgtccgcacacccagggaaaaagct

SEQ ID NO: 163 - DNA, 216 bp, Klebsiella pneumoniae
tcaccgtccgctggttcaccacagacagattgtaaaacagcggcaggcgtaccagacgctcgctctcctgagtggtgtagcggtcttcaccgcggaattcgccgaactgttcgcctgccgggcagctgtgcaggggaatgtaatggaataccgcgaggatctccgcctctttcagccaggcgatcagtctgctgcgatcctcgatatcacgcagct

SEQ ID NO: 164 - DNA, 78 bp, Klebsiella pneumoniae
agcgatcgaggtcgacaaacgccaggctcaccggctcatggcggcgctgggccgtcagcagggcatactctgccaggg

SEQ ID NO: 165 - DNA, 132 bp, Klebsiella pneumoniae
cgccacagccattccaccggcccctggcggaagcggcgcagccagagcgatgagacaaggaggttaacggcccagatgggggggacaaaggccagcagctgcagacgatcgaagcgcataaacagcccaaga

SEQ ID NO: 166 - DNA, 315 bp, Klebsiella pneumoniae
ttttttcggcagctgtacttcaacggcgtcggcgttccgctttttcagttgctgggcaatcgcccactcaatgtgttcgtcgagaagcgggtgctcgccccggcggctctccagggcgcgaagatgggcttcatcccagggcgcattgcccaacgcgacggcgatattacgcagccagcgcaggtggccaatgcgacgaatcgccgacccttcggtcaccttcagaaaccacgcttcgctccaggcgaacagctccaccagcggcggggcatgcagcgctttgcgtgggctgaaatcctcttcatcggtgagctg

SEQ ID NO: 167 - DNA, 561 bp, Klebsiella pneumoniae
gccaatcccgataggaatcgaggcggtcattgcgctgaggatgatcaagggaccgaggaagcggccggaggcgttaccggcccccatcatcacgtcggcgccgtaggtggaatcgctctggttgatggtgaacttacgcgccagaatgatgatgtagcccaccgccaggccgaggaccaggccggtgaccagcgacgcggcgaagttcgccaccgggaagacaaagcccgcgccgagcagcagcgccggcacgccaagaccgataccggtctgtatcgcgccgccgatatcgaggatccctaccagcgacccttcgatgatgcgggcgaacaggaagctggcgccaaacgccgccaccgcgccgtaaacgccggtatcaatccccgacttcagcatcgccacgaaggccacttcgttaaaggcgccgatgccgtacaggtagtacatgtgggtcccggcgaagacgccggaggagagcaggccaacaaagatcgggaacgaccagtcggcataccaaaaacctttattctgttccattatccggctcccgttacttgccgc

SEQ ID NO: 168 - DNA, 360 bp, Klebsiella pneumoniae
atgacctcgaaaaccgcccggcggcgacgccgggcagcgaagagcagcagtaaaaaacgggcccctgggggcccgttttgcgtttggcttaatgggcggcttccgcctgactactcacctggcgacagtacagttcatagcgctggcaaaaccattcacgatgttcttcatccatattgccgacaatggcctgaagatcaactggctggccctgggcgtgcattctggcgaaactccgcgccaaaaaatcaaaattcttcattgaatacatatcgttatggttcatgcgcatactccttcagcggtggatgttctgatcagtcatatgccttttactcacttcagtatttacgcttacct

SEQ ID NO: 169 - DNA, 147 bp, Klebsiella pneumoniae
acactaacggtaacgcgaccagcatcaccagggcggcaagggtcgcgccggaaaggaatgtttgtttcacaaccggttcctgaagctgagggtcctccggcggccagcgccggagaaacgggatcaattactgcgcgtacagctgac

SEQ ID NO: 170 - DNA, 231 bp, Klebsiella pneumoniae
tggtgccgcctttcccggcgccgtcccggccttcaaagacaatgcacactttcagtcctttgtgtaccacccagcgctgcagtttcaccagctcaacgtggagtttgcgcagcgctttctcgtacgctttgttgtcgagcggcgcgatttttgccgccgtgtcgaccggattaccgcttttcttgttgcccatcgccatgctccgtgttgccgaggtatccctttgaagtg

SEQ ID NO: 171 - DNA, 339 bp, Klebsiella pneumoniae
aacgataccagcgacaacaggttaagtgtgggggtattacggattaacaaaagtccgttttacccgctgcgaacggcgaaaatagggcgccagcagcgcagcgcccagcagcggaaacagcagctgacgcagggcaagcacatccgagaccggcgagaaggcaaaagcctttatcgccagcagcagggtgatgagcagccagataatatagtgtttcggcaccaccgagcgccgcttgaaaaaggcgatagtcagccagagcgtgtaataccacatggcgagggcaaacagcagcgaggcgacccacagcgccatatggcccgcgctcatggcgcgcag

SEQ ID NO: 172 - DNA, 396 bp, Klebsiella pneumoniae
aaacacacggccaaagcgggcttcgtagcgggcattgccctcccgcagggcctgcgcgagccgctcattctcgctgtccaccgacgactgctcctggcgcgacagcgccgcatgcgcctggctgccggtcggcttctcaccgatccgcggatgggcgctgagcgccgcgttcagctcatcctctccccagttagccatcgcctcccgggcggtctgcagcagcgcatggcggctggcgaaaggtcgcaagctcaccagcgtctcgccccaggccgggagcgccacgcagggggccagcagccccgccgcctcatctttactcaggctgttaaactgactcagcgcgatcatcctgactccttatcgttttcgtcgccgcctgctcctgcggcagaa

SEQ ID NO: 173 - DNA, 231 bp, Klebsiella pneumoniae
tccttgcaaagctgcgccatattgagcgtggtttgcggcgtaatacgagcgcgctgcgctttttgcgtcggcggggagacggtctcgctgcagcccgcgaggagcagcaccagcatgacggaaacaacacctttcaccacgttctcctccaccgccttgttagcaagttgttatcctaaagattcagtattacaggtattttgcgaatatcatgaaactgcgacaagtctg

SEQ ID NO: 174 - DNA, 498 bp, Klebsiella pneumoniae
acgtcaatccgacgggcttcatcgagcatcgaggctttggcgcggatccgcgcttccagctggtcgatcatgtcgttgttgtccaggcgatctttacgcacgccgtcttcatacaggccgcttttcttgttgccgccggtgacgccaagggtggagaccagcgcttcgcccgggccgttcaccacgcaaccaatgatcgaaacatccatcggggtgatgatatcttccagacgctgctccagagcattcaccgtaccgataacgtcaaactcctggcgtgaacaggtcgggcaggcgataaagttaatgccgcgggaacgaatacgcagagatttgaggatatcgaagccgaccttgatctcttccaccggatccgccgccagcgagacgcgcagcgtatcgccgatcccctcggacagcagtagtcccagaccgatcgccgattttaccgcgccgctgcgcgcgccgcccgcttcggtgatcccgagatgcagcggc

SEQ ID NO: 175 - DNA, 312 bp, Klebsiella pneumoniae
cccgcgcgggcaggctgtgcgccgccacgacgttttccaccagttccaccaggtccaccgcttcgcgagccaccgggccgtcggcctgttttcggttatagtccagcagctgttcaatcagcttttgcaggttacggctactgctgtcgaggatctcgacaatctcctgctgctcaggggtcaggggccccgcgacccggtcggccaacagctcggtaccttcacgcatactggccaacggggttttcagctcatgcgacagatggcgaagaaattgatgccgctgcgactccagccacgccaggcgctcgc

SEQ ID NO: 176 - DNA, 78 bp, Klebsiella pneumoniae
actgctccaggtatgccaccagcgcgtcgcggtagttggcgcgcgcttccagcgaaccgatggagttcagctccaggc

SEQ ID NO: 177 - DNA, 423 bp, Klebsiella pneumoniae
ctgcggattgatgttaaacagcaggccggcgaagaaggtggccaccgcccagcccagcgagccccacatccgcgccctgccgaattcaaactggctctgacgcgccaccctctcggtgtaagattccagcacgccgatgccgccgttaaaggtcaaaccgatatagatcccgccaaagatgctgcccaacaggacgttgattttcagcaggtggccgaacagcagatacgccggaccagagaggatcagcagcgcggtgatataccagagcagatgtttgcgcagccccagcttgtcctggataaatccatagcaaacttgcgcaaacagcgcggaaaccgacagtacggcatagataataccggtatcgccagccttcagcccaacctcctggtgaagccagatagagagcaaggagccgga

SEQ ID NO: 178 - DNA, 225 bp, Klebsiella pneumoniae
tgtcgtggtgcaccagcttctcgttctggatgccgacgcaacggccgccatggccctgcagcagcagctcaatcgcataggcgcccatgcgggaagccaggatgcggtcgtaaggaaccggggaaccgccgcgctgaatgtggccgaggacggtggcgcgagtttcacggccagtctctttctcgatatagcttgccagctcgtcaacgtcgcacatgtgctcgg

SEQ ID NO: 179 - DNA, 204 bp, Klebsiella pneumoniae
gtggcgcgcagaagctgcgcggttttcaggaagtcggcgctaagcatttcgactttcgcgccgcggctgccgggtagcagagcgaggcagcgcacgctgtgcgggatccctaaccggtcgcgcgcagcgcctttgtcaggatccagcggcatcgcatccgccatggtatggccaataaagcggcaggggacgttaaatttgtca

SEQ ID NO: 180 - DNA, 144 bp, Klebsiella pneumoniae
cccaacgcaccgcgatgtcaccaggtaaattcgcatttacccccagcgtccaggcggcatctttccgctgcgcccgggtttcgaaatgcaccacctggccggtgccatggacgccggcgtcggtgcggccgggccaaaagacgg

SEQ ID NO: 181 - DNA, 477 bp, Klebsiella pneumoniae
ccgccagatggttttcaaaggtggcctgcggatgctgatcctgcagggttcgaccgaatgaagaaccgcggtgatgagcaagcccttccaggtcgataccgtccgggcgcgagcaaaccagctgagttttgccgttgccggtacagccgccaatcagcacgatcggccgctgcaccagttcgtcggtggcctggatcgccgcctggcgtagcgctttatagccgccgacgatcagggggtaatccacgccagcttctttcagccactgctggacgatatgcgagcgctggccgccgcgggcgcagcacaggtaaccgtgtgggtaacgggcgcacgcttccagccacgcctgagtacggctggcgcgcaggtcaccctggaccagtttatggccgagcgccagcgccgcttccggcccctgacgcttgtagcaggtgccgaccgcggcgcgttcttcatcattcatcagcggcaggt

SEQ ID NO: 182 - DNA, 303 bp, Klebsiella pneumoniae
tgctcctgcgggtttttcccggtcaccgcggtgatttccgccgccagcaggcacatgatgatgccgtctttatcggtggaccacggcgtgccgtcgaagcgcaggaaggaggccccggcgctctcttcgccgccgaagccgaagctgccatcgaacaggccgtcgacaaaccacttaaagcccaccggcacttccaccagcttgcggcccagatcgttcaccacgcggtcaatcatcgcggaggagaccagcgttttacccaccgccacctctttgccccactgcggacgatgctggaacagg

SEQ ID NO: 183 - DNA, 255 bp, Klebsiella pneumoniae
cacaccaccgccagcaggataccggccactttaccaatcggggtgctcaggctttcaacgccgccgccgactttcgccagcgccaccaccgtcagcaccggcagacccaccgcagtgatcaggaagccgatcgccgccgtccagacgtgctcgcccgcctgtaagccaaccatcggagggaaaataatgttgcctgcgccaacgaacaacgcgaaggtcataaagcccaacgctatgatgtcgcgagattttaac

SEQ ID NO: 184 - DNA, 501 bp, Klebsiella pneumoniae
tcaggcttcccagctcgcgccgacgctttttattacgcatctgcatctggtgcagaccatacagcagcggctcccaactgccgcggccaggcggaggagtcatgctccggtccacccacagccaccacgacaggcgcatcaaattccagaaatgccagatcagcaaaccggtcactgccgccagtaaaaaccacggcagatgccccacaaacgcccccagaatcagggccggaatacacgctaaaaagagctccagcgccagccttttccatgacagccgttccagcacgggtcacactcctgtcaaaattcagaaacgggcggagaaacgataccccgtgccgcgaaccgtttgcaccatacgatcatggccactgtgttccagcgctttgcgcaggcggcgaatatggacgtccaccgtgcggtcttccacataaacgttggtcccccagacgtggttcagcagctgttcgcggctgtacacccgctccggatgggtca

SEQ ID NO: 185 - DNA, 315 bp, Klebsiella pneumoniae
aagcacgacagtaataacaaaagaaattttggcggaacgtttccctgcttcgagggtttcgtcaaggtagccaaagtccatcatcagatggcgaataccgacaacgacgtgataggccagcgcggtgagaatgccccacatgatgaacttcacaaagaagctatccatgatggaggccgccgtcagaaaaccttctggggaggaaaggctggtgcccagcagccaaagcagaattccgaccgccacgaaggtgatgacaccggaaacgcgatggagaatggacgctatcgccgtgattgggaaccgtatcgtttg

SEQ ID NO: 186 - DNA, 486 bp, Klebsiella pneumoniae
agcgtcgccatcagccccggcgtacgctgggcggcggtcaggatcgccgcgcaggccaccggattgcgcttatgcggcatcgtcgacgagccgccgcggccttccgccaccggctcgccgacctcagccacttcggtctgcatcagcagggagaaatcgttagcgaatttccccagcgtgccgcagacgccggcgaaccaggcgcccgcctccagcagccgatcgcgctggctgtgccacggagtatccggcagcgacagaccgaggatctgcgccagcgccaggccaaccgccggccctttctcttttagcgcgtccagagtgcccgcggcgccgccgaactgcagcgccagcagtcgcggacgcatctcgcgcagccgctgctgccagcgcaggagcgcgtcgagggtgcccgccagcttcaggccaaaggtcaccggcagcgcgtgctgcatccaggtccggcccggcatcacggtatcgcga

SEQ ID NO: 187 - DNA, 348 bp, Klebsiella pneumoniae
cctccgccagcgccggctccacctccgccaaccgcttcgcttccagcagctgatacggcacgccggcgtcctccagcaccgcgatgtcgcgggtggcattttcatactgtttggcggtacggaacagctgcagcgtcccgccctggcgcccttcatactgaatgccggtggtgtcgcgcagcgccttcaggcagtcgcggctgtactccgccaggcgcaccatacggcctttgttctccatatagtggcgggtgtcgcagttgcgcagcatctgccacatccacttcaactggaacgaggtgccgtcaagaccgatcgccagcggcgcatggcgctgaaacatccatt

SEQ ID NO: 188 - protein, 129 aa, Klebsiella pneumoniae
FSYIMLGTNDLPRAIKFYDPLMALLGHVKAGRNEQGASWGTFNGNHTCGLCVGVPFDQQPAGVGNGTMVALNARSVAHIAELHALALQLGGRDEGGPGHRPQYGDGFHSAYVRDPDGNKLAFVYYASAD

SEQ ID NO: 189 - protein, 331 aa, Klebsiella pneumoniae
ADKMVIAHRGASGYLPEHTLPAKAMAYAQGADYLEQDLVMTKDDRLVVLHDHYLDRVTDVAQRFPQRARKDGRFYAIDFTLDEIKSLKFTEGFEPKNGKNVQTYPGRFPMGKSDFRIHTFEEEIEFVQGLNHSTGKNIGIYPEIKAPWFHHQEGKDIAASTLKVLKEYGYTSKQDKVYLQCFDANELKRIKNELEPKMGMDLNLVQLIAYTDWNETQQKQADGKWVNYSYDWMFKPGAMAQIAQYADGIGPDYHMLVAEGSKPGAVKLTAMVKEAHASHLQVHPYTVRADQLPEYATNVNQLYDVLYNQAGVDGLFTDFPDKAVQFLDAKR

SEQ ID NO: 190 - protein, 179 aa, Klebsiella pneumoniae
LLMQRITKLDNDLTCKGMLMKLWNKTLLASALCLTLFGCDDASKVDNKLDKAKDNAEQMKDAAADKAQAIKQDADKQIDTLKSQADAEADRLKDQASAIKAEADKKADAIAQQAKAQADAVKQNAKQESDRIVKEAGQIKDNAIGDANQLSAEAASKTKAIQDSIAKDKQNAAPPAAQQ

SEQ ID NO: 191 - protein, 168 aa, Klebsiella pneumoniae
VPVTEPSSRRSGYARLLDRAIRILAMRDHSEQELRRKLVAPVMSKNGPEALDVTPDELEQVVAWCIENRYLDDNRFVGQFIASRSRKGYGPARIRQELSQKGIARQVVDQAMRECDIDWVSLAREQAQRKYGEPLPSAFTEKVKVQRFLLYRGYLMEDIQEIWRNFAD

SEQ ID NO: 192 - protein, 419 aa, Klebsiella pneumoniae
SKVRIAIIGNGMVGHRFIEELLDKAPAGQFDITVFCEEPRIAYDRVHLSSYFSHHTAEELSLVREGFYEKHGVKVLVGERAITINRQEKVIHSSAGRTVFYDKLIMATGSYPWIPPIKGAETQDCFVYRTIEDLNAIESCARRSKRGAVVGGGLLGLEAAGALKNLGVETHVIEFAPMLMAEQLDQMGGEQLRRKIESMGVKVHTSKNTKEIVQQGTEARKTMHFADGSELQVDFIVFSTGIRPRDKLATQCGLAVAQRGGIMVNDSCQTSDPDIYAIGECASWNNRVYGLVAPGYKMAQVAVDHLLGSENSFTGADLSAKLKLLGVDVGGIGDAHGRTPGARSYVYLDESKEVYKRLIVSADNKTLLGAVLVGDTSDYGNLLQLVLNAIELPENPDSLILPAHAGSGKPSIGVDKLPD

SEQ ID NO: 193 - protein, 434 aa, Klebsiella pneumoniae
GVDKLPDSAQICSCFDVSKGDLIAAINKGCHTVAALKAETKAGTGCGGCIPLVTQVLNAELAKQGIEVNNNLCEHFAYSRQELFHLIRVEGIKTFDELLEKHGQGYGCEVCKPTVGSLLASCWNEYILKPQHTPLQDSNDNFLANIQKDGTYSVIPRSAGGEITPEGLVAVGRIAREFNLYTKITGSQRIGLFGAQKDDLPEIWRQLIEAGFETGHAYAKALRMAKTCVGSTWCRYGVGDSVGFGVELENRYKGIRTPHKMKFGVSGCTRECAEAQGKDVGIIATEKGWNLYVCGNGGMKPRHADLLAADLDRETLIKYLDRFMMFYIRTADKLTRTAPWLDNMEGGIDYLRSVIIDDKLGLNDHLEEELARLRAAFACEWTETVNNPAAQTRFKHFINSDQRDPNVQVVPERDQHRPATPYERIPVTLVEEKA

SEQ ID NO: 194 - protein, 518 aa, Klebsiella pneumoniae
VTTSSQWQDSHSPLQVVLQASLLESGGRPVTRTVKQPIWPAEALPGIRPQFTLKDVYDYRTDTTVKQPVVDENSNAAFDIVYADVKGEKKAISGLQVRLIRERRDYYWNWSDSEGWQSQFDQKDLQEGEESLDLQAGQIGKVSFPVEWGSYRLEVKGPDDVVSSVRFWAGYSWQDNSEGAGAARPDRVTMKLDKPSYKPGDTIRLHIAAPAAGKGYAMVESSEGPLWWQEIDVPAEGMDLSIPVDKTWNRHDLYLSTLVVRPGDKSRSATPKRAVGLLHLPLGDENRRLTLALEAPDKMRPNQPLTVKVKASVKEGEAPKQVNVLLSAVDSGVLNITDYATPDPWNAFFGQKRYGADIYDIYGQVIEGQGRVASLRFGGDGDELKRGGKPPVNHVTIVAQQAQPVVLNDQGEGTVTLPIGDFNGELRVMAQAWTADDFGSSEDKVVVAAPVIAELNTPRFLASGDTTRLALDLSNLTDKPQTLQVHLTASGLVTLTEGQLPPVQLAPGARSTLFIPVS

SEQ ID NO: 195 - protein, 245 aa, Klebsiella pneumoniae
VDGWQRAFVLHSRPWSETSLMLDVFTEESGRVRLVAKGARSKRSNLKGALQPFTPLLVRFGGRGEVKTLRSAEAVSLALPLSGITLYSGLYVNELISRVLEHETRFSELFFDYLHCIQALAGASGSPEPALRRFELALLGHLGYGVDFLHCAGSGEPVDDTMTYRYREEKGFIASLVIDNNTFTGHHLKALASREFPDVDTLRAAKRFTRIALKPYLGGKPLKSRELFRQFMPARKARADNTNND

SEQ ID NO: 196 - protein, 680 aa, Klebsiella pneumoniae
VKSLRAWPSTVRTGVKMSSRKELANAIRALSMDAVQKAKSGHPGAPMGMADIAEVLWRDFLNHNPNNPAWADRDRFVLSNGHGSMLIYSLLHLTGYDLPIEELKNFRQLHSKTPGHPEVGYTAGVETTTGPLGQGIANAVGMAIAEKTLAAQFNRPGHDIVDHYTYAFMGDGCMMEGISHEVCSLAGTLKLGKLVAFYDDNGISIDGHVEGWFTDDTAKRFEAYGWHVVRGVDGHDADAIKRAVEEARAVTDKPSLLMCKTIIGFGSPNKAGTHDSHGAPLGDAEIALTREALGWKHAPFDIPSDIYAQWDAKEAGQAKEAAWNEKFAAYAKAFPQEAAEFTRRMKGEMPSDFDAKANEFIAKLQANPAKIASRKASQNAIEAFGPLLPEFLGGSADLAPSNLTLWSGSKPINEDAAGNYIHYGVREFGMTAIANGIALHGGFLPYTSTFLMFVEYARNAVRMAALMKQRQVMVYTHDSIGLGEDGPTHQPVEQVASLRVTPNMSTWRPCDQVESAIAWKYGVERQDGPTALILSRQNLAQQERTAEQLANVARGGYVLKECTGSQPELIFIATGSEVELAVAAWDKLTAEGVKARVVSMPSTDAFDKQDAAYRESVLPKAVTARVAVEAGIADYWFKYVGLNGAIVGMTTFGESAPAEQLFEEFGFTVDNVVAKAKALL

SEQ ID NO: 197 - protein, 306 aa, Klebsiella pneumoniae
EVKIALVAKSLGNGFFEAANVGAQQAAKELGDVKVIYTGPTTTTAEAQIDVLNGLIAQGVDAIAISANDPDAVVPVLKKAMQRGIKVVSWDSGVAPAGRQIHLNPSNNALIGETNVKLAADALQALNVEKGEVAVLSATPTSTNQNIWIEEMKKVLPQYPSVQLVTVAYGDDLSDKSYREAVGLLKSYPDLKVIVSPSSVGIVAAAQAVKDQGKIGKVYVTGLGLPSEMAGAIKSGASKSFAIWNPIDLGYAATYLADDLVKGTATKTEASMGKLGKVNLDAEGNGAMAKPFVYDASNIDKFSKIF

SEQ ID NO: 198 - protein, 226 aa, Klebsiella pneumoniae
ANKTLVVATDTAFVPFEFKQGDKYVGFDVDLWAAIAKELKLDYTLKPMDFSGIIPALQTKNIDLALAGITITDERKKAIDFSDGYYKSGLLVMVNANNNDIKDVKDLNGKVVAVKSGTGSVDYAKANIKTKDLRQFPNIDNAYMELGTGRADAVLHDTPNILYFIKTAGNGKFKAVGESLEAQNYGIAFPKGSDELREKVNGALKTLRDNGTYNEIYKKWFGTEPK

SEQ ID NO: 199 - protein, 334 aa, Klebsiella pneumoniae
RFIWLYTELKNAPTLKTYSAAVDWNVPGHYFAETFSRSGMNPSGQSIRGEIMKKSLASMCLSAVLTVAFSYHAVAADLPEIEKSGTLKVATEDDYAPFNFMNNGQADGFNKDMLEELRKYAKFHVDQSILPWTGLLAAVSTGQYDMALTGAVITDERLKVFDFTPPWASAQHYFVKRAGDTSLNTIADLSGKKVGVQAGSALLARLPELKAMLEKTGGKLGPVVEYPSYPEAYADLANKRLDYVINVVISVNDLAKAKPKVFAKGLAVSGPGYMAWPIPKNSPQLLAYMTRFMNHMKETGKLAELQKKWFGETYDNLPTEAITSPEQFHKLAGL

SEQ ID NO: 200 - protein, 596 aa, Klebsiella pneumoniae
NLYNVQIVRFDDYQTRSNENRIKLVPIPPSRGIIYDRNGTPLALNRTIYQLEMMPEKVDNVQQTLDALRDVVDLTDDDIAGFKKERARSHRFTSIPVKVNLSEVQVARFAVNQYRFPGVEVKGYKRRYYPYNSALTHVIGYVSKINDKDVDRLDKEGKLANYASTHDIGKLGIERYYEDVLHGQTGYEEVEVNNRGRVIRQLKEVPPQAGRDIYLTLDLKLQQYIETLLAGSRAAVVVTDPRTGAILALVSTPSYDPNLFVDGISSKDYSALLNDPNTPLVNRATQGVYPPASTVKPYVAVSALSAGVITRNTSLFDPGWWQLPGSEKRYRDWKKWGHGHLNVTKALEESADTYFYQVAYDMGIDRLSEWMSKFGYGHYTGIDLSEERSGNMPTREWKLKRFKKPWYQGDTIPVGIGQGYWTATPIQMNKALMILINDGVVKVPHLLQSTVEDGKPVPWVQPHEPPVGDIHSGYWEIAKDGMYGVANRGNGTAHKYFASAPYKIAAKSGTAQVFGLKANETYNAHRISERLRDHKLMTAFAPYNNPQVAVAMILENGGAGPAVGTIMRQILDHIMLGDNNTTLPSENPAVTAGEDQ

SEQ ID NO: 201 - protein, 717 aa, Klebsiella pneumoniae
AETATDDKNSAAEETMVVTAAEQNLQAPGVSTITADEIRKRPPARDVSEIIRTMPGVNLTGNSTSGQRGNNRQIDIRGMGPENTLILIDGKPVTSRNSVRLGWRGERDTRGDTSWVPPEMIERIEVIRGPAAARYGNGAAGGVVNIITKKTGDEWHGSWNTYMNAPEHKDEGSTKRTNFSLSGPLGGDFSFRLFGNLDKTQADAWDINQGHQSERTGIYADTLPAGREGVKNKNIDGLVRWEFAPMQSLEFEAGYSRQGNLYAGDTQNTNSNDLVKENYGKETNRLYRNTYSVTWNGAWDNGVTTSNWAQYERTRNSRKGEGLAGGTEGIFNSNQFTDIDLADVMLHSEVSIPFDYLVNQNLTLGSEWNQQRMKDNASNTQALSGGEIPGYDSTGRSPYSQAEIFSLFAENNMELTDTTMLTPALRFDHHSIVGNNWSPSLNLSQGLWDDFTLKMGIARAYKAPSLYQTNPNYILYSKGQGCYASKDGCYLQGNDDLKAETSINKEIGLEFKRDGWLAGVTWFRNDYRNKIEAGYAPVYQNNKGTDLYQWENVPKAVVEGLEGTLNVPVSETVNWTNNITYMLQSKNKETGDRLSIIPEYTLNSTLSWQVRDDVSLQSTFTWYGKQEPKKYNYKGQPVTGSEKNEVSPYSILGLSATWDVTKYVSLTGGVDNVFDKRHWRAGNAQTTGGATGTMYGAGAETYNESGRTWYLSVNTHF

SEQ ID NO: 202 - protein, 404 aa, Klebsiella pneumoniae
VDFHGYARSGIGWTGSGGEQQCFKATGAQSKYRLGNECETYAELKLGQELWKEGDKSFYFDTNVAYSVNQEDDWESTSPAFREANIQGKNLIDWLPGSTLWAGKRFYQRHDVHMIDFYYWDISGPGAGLENVDLGFGKLSLAATRNSESGGSYTFSSDDTKKYAAKTANDVFDIRLAGLETNPGGVLELGVDYGRANPQDDYRLEDGASKDGWMWTGEHTQSIWGGFNKFVVQYATDAMTSWNSGHSQGTSIDNNGSMIRVLDHGAMDFNDDWGLMYVAMYQDVDLDSKNGSTWYTVGVRPMYKWTPIMSTQLEIGYDNVKSQRTSENNNQYKITLAQQWQAGNSVWSRPAIRIFATYAKWDENWGYSNTSGLQTKDSSGSGAFTSSRGDDSEVTFGAQMEVWW

SEQ ID NO: 203 - protein, 632 aa, Klebsiella pneumoniae
MAIEIKVPDIGADEVEITEILVKVGDKVEAEQSLITVEGDKASMEVPSPQAGVVKEIKVSVGDKTETGKLIMIFDSAEGAAAAAPAQEEKKEAAPAAAAPAAAAAAKEVHVPDIGGDEVEVTEIMVKVGDTIAAEQSLITVEGDKASMEVPAPFAGTVKEIKINTGDKVSTGSLIMIFEVAGAAPAAAPAQAAAPAAAAPAAAAGVKDVNVPDIGGDEVEVTEVMVKVGDKVAAEQSLITVEGDKASMEVPAPFAGTVKEIKISTGDKVKTGSLIMVFEVEGAAPAAAPAQAAAPAPAAAPAQAAKPAAAPAAKAEGKSEFAENDAYVHATPLIRRLAREFGVNLAKVKGTGRKGRILREDVQAYVKEAVKRAESAPAAAAGGGIPGMLPWPKVDFSKFGEVEEVELGRIQKISGANLSRNWVMIPHVTHFDKTDITDLEAFRKQQNAEAEKRKLDVKFTPVVFIMKAVAAALEQMPRFNSSLSEDGQRLTLKKYINIGVAVDTPNGLVVPVFKDVNKKSITELSRELTTISKKARDGKLTAGEMQGGCFTISSIGGLGTTHFAPIVNAPEVAILGVSKSAMEPVWNGKEFVPRLMLPISLSFDHRVIDGADGARFITIINNTLSDIRRLVM

SEQ ID NO: 204 - protein, 257 aa, Klebsiella pneumoniae
MDRIIEKLDRGWWVVSHEQKLWLPGGELPHGEAVNFDLVGQHALHIGEWQGESVWMVRQDRRHDMGSLRQVLDQDPGLFQLAGRGIQLAEFYRSHKFCGYCGHPMHASKSEWAMLCSHCRERYYPQIAPCIIVAIRRDDAILLAQHTRHRNGVHTVLAGFVEVGETLEQAVAREVMEESGIRVKNLRYVTSQPWPFPQSLMTAFMADYADGEIVVDKKELLTADWYRYDDLPLLPPPGTVARRLIEDTVAMCRAEFE

SEQ ID NO: 205 - protein, 130 aa, Klebsiella pneumoniae
MFSYIMLGTNDLPRAIKFYDPLMALLGHVKAGRNEQGASWGTFNGNHTCGLCVGVPFDQQPAGVGNGTMVALNARSVAHIAELHALALQLGGRDEGGPGHRPQYGDGFHSAYVRDPDGNKLAFVYYASAD

SEQ ID NO: 206 - protein, 587 aa, Klebsiella pneumoniae
MNVLRRKWQGLPRGVVVCITALVIYVPLLFIVVQSFLSAPFFSRSKSWSLEAFAFIFTDPDFYLALRSGFILAFGLVIIAIPLGGILAFLMVRTDLPGRRIIEPLILVPIFVSPMVLGFGYVVAAGPVGFFSQWAQQLIGFVPWNIYSMFSIVVIAGLTHVPHAYLYISSALRSVGSDVEEAARTVGATPLQVMTSVSLPMVRPSILYACVLLFFLGLEVFGLMLVLGDPEGNMVLATYLYKLTNKLGTPSYHLMAAVAVVLICITIPLVMLQRRLMRTANRFVTMKGKASQARALPLGKWRWVAGAVVVAWLTVTIGVPLLGVALRAFISNWGVGVSLWDELSLATFHNIWQQPNLLRAIVNSMAIGIIGGALAVICYLFVGIAMHRKADNVTRFLDYSVLVPRAVPGLLAGLAFLWVFLFVPMWLDQSLKHGWLSALRWPTGCGSTLSCSCALRNTIFSVWLAYTVVWMATLRLISSTLLQVGPELEEAARSTGASRGQITRHVTVPLSRYGLIGSWLLMFLIFEREYSTGVYLLSPGTETIGSMLVSLWAAGAIDIVAALSFINILLVVIGLGIALRFGVKLHD

SEQ ID NO: 207 - protein, 301 aa, Klebsiella pneumoniae
MQDLNDFAWFVQVVDHGGFAAAGRALDQPKSKLSRRIAQLEERLGVRLIQRTTRQFAVTEVGQTFYQHCKAMLIEAEAAQQAVETLRAEPRGSVRITCPVTLLHVHIGPMLARFMARYPGVTLHLEATNRRVDVVGEGIDVAIRVRPRPIEDSDLVMRVLADRGHRLVASPDLISRLGRPQAPSELSAWPGLSLGANKHQHKWQLTGPGGARAEVYFTPRMVTTDMLALREAAMAGVGVVQLPLLMVRDQLASGELEVVLDEWQPRREVIHAVFASRRGLLPSVRALVDYLSEEYQRMEED

SEQ ID NO: 208 - protein, 381 aa, Klebsiella pneumoniae
MSGANASGYLESRTMKTETPTVKMVAIAADEAGQRIDNFLRTQLKGVPKSMIYRILRKGEVRVNKKRVKPEYKLEAGDEVRIPPVRVAEREEEAVSPHLQKVAALSEVILYEDDHILVLNKPSGTAVHGGSGLSFGVIEGLRALRPEARFLELVHRLDRDTSGVLLVAKKRSALRSLHEQLRDKGMQKDYLALVRGQWQSHTKVVQAPLLKNILQSGERIVRVSQEGKPSETRFKVEERYEFATLVRCSPVTGRTHQIRVHTQYAGHPIAFDDRYGDREFDKQLSATGLNRLFLHAAALKFTHPGSGEVMRVEAPAGQPAEALFTGATEEQISATRNQFRRFFCLSLTAGCSFHGATSDRARLRVNRPGCSGRGLPAVRTA

SEQ ID NO: 209 - protein, 842 aa, Klebsiella pneumoniae
MNKITKYIDALPLSDAEKSALPDTSLQAVHQALDDDHQTFAREDDSPLGSVKARLAHSWPDSLSGDQLVKDDEGRTQLHAMPKAKRSSMIPDPWRTNPVGRFWDRLRGRDVTPRYLSRLTQEERESEQKWRTVGTIRRYILLLLTLSQTVVATWYMKTILPYQGWALINPADMVGQNLWISFMQLLPYVLQSGILILFAVLFCWVSAGFWTALMGFLQLLIGRDKYSISASTVGDEPLNPAHRTALIMPICNEDVDRVFAGLRATWESVKATGNAAHFDVYILSDSYNPDICVAEQKAWMELIAEVQGEGQIFYRRRRRRVKRKSGNIDDFCRRWGSQYSYMVVLDADSVMTGECLSSLVRLMEANPNAGIIQSSPRASGMDTLYARCQQFATRVYGPLFTAGLHFWQLGESHYWGHNAIIRVKPFIEHCALAPLPGEGNFAGSILSHDFVEAALMRRAGWGVWIAYDLPGSYEELPPNLLDELKRDRRWCQGNLMNFRLFLVRGMHPVHRAVFLTGVMSYLSAPLWFMFLALSTALQVVHALTEPQYFLQPRQLFPVWPQWRPELAIALFASTMVLLFLPKLLSIILVWCKGPKEYGGFFRVTLSLLLEVLFSVLLAPVRMLFHTVFVVSAFLGWEVVWNSPQRDDDSTPWGEAFMRHGSQLLLGLVWAVGMAWLDLRFLFWLAPIVVSLILSPFVSAISSRATVGLRTKRWKLFLIPEEYSPPQVLKDTDAYLTMNRQRSLDDGFMHAVFNPSFNALATAMATARHRQGHILEIARERHVEQALNETPDKLNRDRRLVLLSDPVTMSRLHYRVWAAPEKYSSWVNAYQQLALNPLALKTK

SEQ ID NO: 210 - protein, 200 aa, Klebsiella pneumoniae
MEMAKILVLYYSMYGHIETMAHAVADGANRVDGVEVVVKRVPETMQAEAFAKAGGKAQNAPVATPQELAEYDAIIFGTPTRFGNMSGQMRTFLDQTGGLWASGALYGKIASVFSSTGTGGGQEQTITSTWTTLAHHGMIIVPIGYGAQELFDISQVRGGTPYGATTIAGGDGSRQPSEEELAIARYQGEHVAKLAVKLHG

SEQ ID NO: 211 - protein, 773 aa, Klebsiella pneumoniae
VEQHAGDFSVTVRDVRQLTQPESDLLTLLWVLEGSVNLAVAEGASQPLAADGLAIVNRNRRWSLRSAGANAVMILTLSANWLARLDNAFFAVDYQITPRTRDADDGLRRLMRQLLVSGLVNHPGHYRLEANRWLSEIALLLATRFSQPIASTPRRDTEKWSRRIASVVARIDANYQRRLSLHEVAAAEFVSEAWLSRLFRKEVGVSFVQYLTALRLRHAADQLLTTRKTVQQIAREQGFASTRMMSDLFKRQHGVTPRQYREQHPLELARPRPPQADRWQPVAADRLYARLNEPEPRDRESPPLPINPPQTREINLRDRPARPAALRHTRMVVTVRELDDLLREDVRRELEQLHHALPVYAIDINDPFLSSRLFGTGWDDPQMAGYACWYNLQQIFSWLAAMGWQVILHTGVTTRSDLLQRFLQLAANHFPPATLNSWRFVWHWSPQASEAARQAAWRQQRGVLHRLLPQPQLGIWHRFAPSDPGNDPLFHSPLLAEADFLACQADANEQLDLAQADSSRLASSEHYPLHKLRQIHSALRQRQLNLPLWLLSWNTLTGDTRDTNGRFFRGALLMDNLLGVADQVWLAGFWLNSGLQGEARANGKLDTSSLALHYLHGLPRPVYWVLWLWRRLRGEILVHDKNLLLLHHQGHYQLLLRNTVVYNPWLSSEAAFIQRFSQLYSVRLQGLDGSWRIKQHLFDQHHGALFPLVDAFRSRSGPDAEDYQWLMHQARPALSVDEARLDGYWLRIDSLQSNALVLYEFTPQLSSGADPAP

SEQ ID NO: 212 - protein, 315 aa, Klebsiella pneumoniae
MKAAVVFDLAEGPVWAEFIDPQPAPGQTLIDVRAAAISHVVKARASGRHYSFDGNLPFVPGIDGVGTTPQGQRVYFAFPTAPFGSMAQRAPVALQNCLPLPDALDDIQAAAMANPGMSAWASLVTRAQLQAGETVLINGATGSAGQLAVQIARYLGAKKIIATGRNAQSLAALDADECIQLTADDKTLSGQFSAVSAAQIDVVIDYLWGHSAELLLPALAKYTPAGSPVRYVQVGSLAGADIALNGAVLRSAPLLLMGSGIGSLSVSQLLAATGEMLQAAVPGKLTIATTPRPLQEIAAAWPQDDSQKRTVFTLG

SEQ ID NO: 213 - protein, 482 aa, Klebsiella pneumoniae
VDLSIIISAVIALAAGLMVGWLATKARADQIRADLIEERRELDIELSAARQQLAQEAHWREECELLNNELRSLRDINTSLEADLREVTTRLESTQLHAEDKIRQMMNSEQRLSEQFENLANRIFEHSNRRVDEQNRQSLHGLLTPLREQLDGFRRQVQESFGQEARERHTLAHEIRNLQQLNAQMAQEALNLTKALKGDNKTQGNWGEVVLTRVLEASGLREGYEYQTQVSIETDNRSRMQPDVIVRLPQGKDVVIDAKMTLVAYERYFNAEDDYTREVALQEHLASVRNHIRLLGRKDYQQLPGLRSLDYVLMFIPVEPAFLLAIDRQPELISEALQNNIMLVSPTTLLVALRTIANLWRYEHQSRNAQKIAERAGRLYDKMRLFVDDMSAIGQSLDKAQESYRQAMKKLASGRGNLLAQAEAFRGLGVEVKRGINPDLVEQATAQDEQYRLEDEDNLPENDAFSADSAETVRSREAAPPR

SEQ ID NO: 214 - protein, 398 aa, Klebsiella pneumoniae
MLNVEMLSTGDEVLHGQIIDTNAAWLADFFFNQGLPLTRRNTVGDDLDALVAILRERSEQADVLIVNGGLGPTSDDLSALAAATAKGEGLILHPEWLETMTRFFAERGRPMAESNRKQAEIPASAEMINNPVGTACGFAIQLNRCLMFFTPGVPSEFKVMVEQEILPRLRQRFTLPDPPVCLRLTTFGRSESELAQSLNPLTLPPGVVMGYRSSMPIIELKLTGPANQRDAMLALWPEVRKVAGDSLIFEGTEGLPAQIARCLQERQLSLTLSEQFTSGLLALQLSRAGAPLLASEVVPAQEETLAQAARWAAERRINHFAGLALAVSGQENDHLNVALATPDGTFALRVKFSATRHSLAVRQEVCAMMALNMLRRWLNGQPLASEHGWINVVDSLSL

SEQ ID NO: 215 - protein, 315 aa, Klebsiella pneumoniae
MIEFQGVSKVFAGHPAVKDLTLELREGAFSVLVGTSGSGKSTTLKMINRLLEPDRGTIRFAGEDIRQQPVLTLRRRMGYAIQSIGLFPHWTVAQNIATVPQLQRWPRARIADRIDELMALLGLEATLRDRYPHQLSGGQQQRVGVARALAADPEVLLMDEPFGALDPVTREALQQEMLRIHRLLGRTIVLVTHDIDEALRLADHLVLMDGGEVVQQGAPLEMLLRPKNSFVQTFFGRSELGVRLLSLREVGDYLRPDERLAGEGLTVTMTLREALSQFVARRCETLPVVDAEGRPCGTLHFADLLRQEMSHEGAS

SEQ ID NO: 216 - protein, 356 aa, Klebsiella pneumoniae
MKMKLTALMSGMILSSSALCFSATAADKMVIAHRGASGYLPEHTLPAKAMAYAQGADYLEQDLVMTKDDRLVVLHDHYLDRVTDVAQRFPQRARKDGRFYAIDFTLDEIKSLKFTEGFEPKNGKNVQTYPGRFPMGKSDFRIHTFEEEIEFVQGLNHSTGKNIGIYPEIKAPWFHHQEGKDIAASTLKVLKEYGYTSKQDKVYLQCFDANELKRIKNELEPKMGMDLNLVQLIAYTDWNETQQKQADGKWVNYSYDWMFKPGAMAQIAQYADGIGPDYHMLVAEGSKPGAVKLTAMVKEAHASHLQVHPYTVRADQLPEYATNVNQLYDVLYNQAGVDGLFTDFPDKAVQFLDAKR

SEQ ID NO: 217 - protein, 353 aa, Klebsiella pneumoniae
MRPTMMTYISEEPACLAQILRDYRQKLAPIETFVRQHPVRRILLLATGSSLNAALCARYFFEQRFGVLLDIKEPYNFTHYDAIDPHADLVVAISQSGKSASTLEAMRKVQASGKSVFALTSDPQSPIGGASDGVLDINTGIESVGFVTRGFSATVLNLLLIALIIARKQEKASEVEEQHYLAELQRLVAAIPEVIVRTSRFIDRHSETLRSGERFVATGYGALVGVAKEFETKFTETVRVPSSGFELEAYMHGPYLEANARHVMLFIEDTPDARTRALRDYLAPSIGRAFTLTLGDEEDAQTLALNCPCEHHLAPLLLIVPVQMLAWHTAGLKGIDLAKRIFDDFDRVLKSKI

SEQ ID NO: 218 - protein, 938 aa, Klebsiella pneumoniae
MSDYKSTLNLPETGFPMRGDLAKREPGMLARWTDDDLYGIIRAAKKGKKTFILHDGPPYANGSIHIGHSVNKILKDIIVKSKGLTGYDSPYVPGWDCHGLPIELKVEQEYGKPGEKFTAAEFRAKCREYAAEQIDGQRKDFIRLGVLGDWSHPYLTMDFKTEANIIRALGKIIGNGHLHKGAKPVHWCVDCRSALAEAEVEYYDKTSPSIDVAFHAVDKAAVLAKFGVADVNGPVSLVIWTTTPWTLPANRAISLSPEFDYALVQVDGQALILAKDLVESVMKRVGATDYTILAAVQGSELELMRFKHPFLDFDVPAILGDHVTLDAGTGAVHTAGGHGPDDYTISQKYGLEIANPVGPDGAYLPGTWPSLDGINVFKANDIIVEMLRERGALLHVEKLQHSYPCCWRHKSPIIFRATPQWFVSMDQKGLRAQSLKEIKGVQWIPDWGQARIESMVANRPDWCISRQRTWGVPMSLFVHKETHELHPRTLELMEEVAKRVEVDGIQAWWDLDSRDILGDDADSYEKVPDTLDVWFDSGSTHSSVVDVRPEFAGHAADMYLEGSDQHRGWFMSSLMISTAMKGKAPYRQVLTHGFTVDGQGRKMSKSIGNTVSPQDVMNKLGADILRLWVASTDYTGEMAVSDEILKRAADSYRRIRNTARFLLANLNGFDPVKDMVKPEEMVVLDRWAVGCAQAAQEDILKAYESYDFHEVVQRLMRFCSIEMGSFYLDIIKDRQYTAKADSVARRSCQTALFHIVEALVRWMAPIMSFTADEIWGYLPGEREKYVFTGEWYEGLFGLADDEAMNDDFWDELLKVRGEVNKVIEQARADKKVGGSLEAAVTLYADADLAAKLNALGDELRFVLLTSGANVADYASASADAQQSELLKGLKVALSKAEGEKCPRCWHYTTDIGKVAEHAEICGRCVSNVAGDGEQRKFA

SEQ ID NO: 219 - protein, 345 aa, Klebsiella pneumoniae
MTDQPQRHRRWVLASRPHGEPTAENFRLEESEVPTPGPGQVLLRTVYLSLDPYMRGRMSDAPSYSPPVAIGAVMVGGTVSRVVSSNHADYQPGDWVLGYSGWQDYELSDGSGLVKLGDNPQHPSWSLGVLGMPGFTAYMGLLEIGQPKAGETLVVAAATGPVGATVGQIGKIKGCRTVGIAGGAEKCRYAVETLGFDLCLDHRADDFAEQLAKACPQGIDVYYENVGGKVFDAVLPLLNTAARVPVCGLVSGYNATGLPDGPDRLPLLMATILKKRIRMQGFIIGQDYGHRIAEFQQQMGRWVQEGKIKYREQLIDGLDQAPQALIGLLKGENFGKVVIRVAADD

SEQ ID NO: 220 - protein, 803 aa, Klebsiella pneumoniae
MTNHWVDIKNANVVVVMGGNAAEAHPVGFRWAMEAKNNNDATLIVVDPRFTRTASVADIYAPIRSGTDITFLSGVLLYLIENNKINAEYVKHYTNASLLVRDDFAFEEGLFSGYDAEKRQYDKSSWNYQFDENGYAKRDETLTHPRCVWNLLKQHVSRYTPEVVENICGTPKADFLKVCDVLASTSAADRTTTFLYALGWTQHTVGAQNIRTMAMIQLLLGNMGMAGGGVNALRGHSNIQGLTDLGLLSTSLPGYLTLPSDKQTDLQSYLSANTPKATLPEQVNYWSNYPKFFVSLMKSFYGEAAQKENDWGFEWLPKWDQAYDVIKYFNMMDNGNVTGYICQGFNPVASFPDKNKVVRSLSKLKYMVVIDPLVTETSTFWQNHGESNDVDPSAIQTEVFRLPSTCFAEEDGSIANSGRWLQWHWKGQDAPGEARNDGEILAGIYHRLRELYRTEGGKGAEPLLKMSWRYKQPDHPESEEVAKENNGYALADLYDQNGTLLAKKGQLLNSFALLRDDGSTASSCWIYTGSWTEQGNQMANRDNADPSGLGNTLGWAWAWPLNRRVLYNRASADINGKPWDAKRMLIQWNGNKWVGNDIPDFNTAPPGSNTGPFIMQQEGLGRLFALDKLAEGPFPEHYEPMETPLGTNPLHPKVVSSPVVRLYEEDAIRLGKKDKFPYVGTTYRLTEHFHTWTKHALLNSIAQPEQFVEISEGLAKSKGIANGDWVKVSSKRGFIRAVAVVTRRLRTLNVNGQQVETVGIPLHWGFEGVARKGYIANTLTPNVGDSNSQTPEYKAFLVNIEKA

SEQ ID NO: 221 - protein, 655 aa, Klebsiella pneumoniae
MLPGRYAVGFSSDSGDVPLMPLLRDEIRDHSAEEMLFIRRAAIAFLLVVVCFGVLIVNLYHLQVEQHDFYQTRSNQNDIKMLPIAPSRGLIFDRNGIPLVQNITLYRLQVIPSKIPDMAALLQQLTPIVDLTPDDIASFRDDMHHTSRYKAVTLKSDLSDVEVARFAVNEFRFPGVTVESYQQREYPYGAELAHVVGYVSKINDSDLQRLAKNGEEENYAADRNIGKQGIEGYYEKALHGTTGYQEVEVDNHGRVVRLLKEVPPVAGKNLYLTLDLHLQQYIESVLKGQRAAVVVVDPRDGGVLAMVSSPSYDPNPFVKGIGYQAYKSLLENPDRPLINRVTQGLYPPASTVKPYMALSALSAGVITPNTTFFGAPTWTLPGTQRRYRDWLKTGHGMLNVTKAIEESADTFFYQVAFEMGIDRIHEWLSKFGYGQSTGIDLNEEYAGVLPSREWKQRVHKKPWYQGDTISVGIGQGYWIATPIQMVKALTTLLNNGKVQDPHLLYSMKQGNHVERYQQPANLPQVGDPKSPYWGIVRNGMYGMANQPNGTGYKLFHTAPYQIAAKSGTSQVFSLKQNQTYNAKMIPVRLRDHIFYTLFAPYQHPKVAMALILENGGGDGVVAGPTARAILDHIFVPQQASSAAADVPQRDSADAQ

SEQ ID NO: 222 - protein, 372 aa, Klebsiella pneumoniae
MNICCANAKAIAGKNSSLNLTEMPAMNPASKKNILVLAALGAAALAAASYGAYWWHTGRFMQTTDDAYVGGDISAISSKVSGYIQQLAVQDNMAVKKGDLLIRIDDRDYRAALAKAAGEVAAQQAALADIQATRQLQQATITGSAASLLAATAATEKLANDNRRYNALAASSAISAQIRDNASADYRRAHAEQEKAKADKTVAERQLAVLDARQQQILAALAQAQANLEIARLNLSYTDIRAPFDGVIGNRRAWSGSFVSSGTQLLSLVPAHGLWIDANFKENQLAHMRAGQPVTIVADVLPNHTFKGHVASLAPATGSRFSILPAENATGNFTKIVQRVPVRIALEGDGAKLDVLRPGLSVIVTVNEKSPR

SEQ ID NO: 223 - protein, 180 aa, Klebsiella pneumoniae
MLLMQRITKLDNDLTCKGMLMKLWNKTLLASALCLTLFGCDDASKVDNKLDKAKDNAEQMKDAAADKAQAIKQDADKQIDTLKSQADAEADRLKDQASAIKAEADKKADAIAQQAKAQADAVKQNAKQESDRIVKEAGQIKDNAIGDANQLSAEAASKTKAIQDSIAKDKQNAAPPAAQQ

SEQ ID NO: 224 - protein, 168 aa, Klebsiella pneumoniae; identical to SEQ ID NO: 191

SEQ ID NO: 225 - protein, 853 aa, Klebsiella pneumoniae
MSTIDNLDAHTPMMQQYLKLKAQHPDILLFYRMGDFYELFYDDAKRASQLLDISLTKRGASAGEPIPMAGIPHHAVENYLAKLVNQGESVAICEQIGDPATTKGPVERKVVRIVTPGTISDEALLQERQDNLLAAIWQDSKGFGYATLDISSGRFRLSEPADRETMAAELQRTNPAELLYAEDFAESSLIEGRRGLRRRPLWEFEIDTARQQLNLQFGTRDLVGFGVENAPRGLCAAGCLLQYVKDTQRTSLPHIRSITMERQQDSIIMDAATRRNLEITQNLAGGTDNTLASVLDCTVTPMGSRMLKRWLHMPVRDTAVLVERQQTIGALQERYTELQPVLRQVGDLERILARLALRTARPRDLARMRHALQQLPLLRELLADVDSQPVQKLREKMGEFTELRELLERAVIDAPPVLVRDGGVIAPGYSEELDEWRALADGATDYLDKLEIRERERLGLDTLKVGYNAVHGYYIQISRGQSHLAPIHYVRRQTLKNAERYIIPELKEYEDKVLTSKGKALALEKQLYDELFDLLLPHLADLQTSASALAELDVLVNLAERAETLNYCCPTFSDKPGIRISEGRHPVVEQVLKEPFIANPLQLAPQRRMLIITGPNMGGKSTYMRQTALIALLAYIGSYVPAQKVEIGPIDRIFTRVGAADDLASGRSTFMVEMTETANILHNATEHSLVLMDEIGRGTSTYDGLSLAWACAENLANKIKALTLFATHYFELTQLPEKMEGVANVHLDALEHGDTIAFMHSVQDGAASKSYGLAVAALAGVPKEVIKRARQKLRELESISPNAAATQVDGTQMSLLAAPEETSPAVEALENLDPDSLTPRQALEWIYRLKSLV

SEQ ID NO: 226 - protein, 373 aa, Klebsiella pneumoniae
MRYVDEYRAPEQVMQLVAHLQQRARLLPHTAARPLRIMEVCGGHTHAIFKFGLDQLLPENIEFIHGPGCPVCVLPMGRIDACIEIASRPGVIFCTFGDAMRVPGKNGSLLQAKARGADVRIVYSPMDALRLAQQNPQREVVFFGLGFETTMPATALTLRQARERNVDNFYFFCQHITLLPTLRSLLDQPENGIDAFLAPGHVSMVIGTEAYGFIASDYHRPLVVAGFEPLDLLQGAVMLVEQTIAQRSDVENQYRRVVPDEGNPLAQAAMADVFRLDGDSEWRGLGVISDSGVQLTPAYQRFDAEAHFRPAPQRVCDDPRARCGEVLTGRCKPHQCPLFASTCNPQSAFGALMVSSEGACAAWYQYRSQENEV

SEQ ID NO: 227 - protein, 406 aa, Klebsiella pneumoniae
MTFSVEQVRADFPVLNREVNGQPLVYLDSAASAQKPEAVIGAEAEFYRHGYAAVHRGIHTLSAEATARMEAVRQQAATFLNAGSAEEVVFVRGTTEGINLVANSWGNANVGAGDNIIISEMEHHANIVPWQMLCARVGAELRVIPLNPDGTLQLDVVPGLFDPRTRLLAITEVSNVLGTENPLAALIALAHQHGAKVLVDGAQAVMHHPVDVQALGCDFYVFSAHKLYGPTGIGVLYARSELLQTMAPWEGGGSMIATVSLTEGTTWNQAPWRFEAGTPNTGGIIGLGAALTYVSQLGLTQIAEYEQTLMRYALDALRAVPDLILYGPAQRKGVIAFNLGQHHAYDVGSFLDNYGIAVRTGHHCAMPLMARYQVPAMCRASLAMYNTTEEVDRLVAGLQRIRKLLG

SEQ ID NO: 228 - protein, 337 aa, Klebsiella pneumoniae
MAPSRTLLAHSSTTGRMPEVLLVPDMKLFAGNATPELAQRIANRLYTSLGDAAVGRFSDGEVSVQINENVRGGDIFIIQSTCAPTNDNLMELVVMVDALRRASAGRITAVIPYFGYARQDRRVRSARVPITAKVVADFLSSVGVDRVLTVDLHAEQIQGFFDVPVDNVFGSPILLEDMLQLNLDNPIVVSPDIGGVVRARAIAKLLNDTDMAIIDKRRPRANVSQVMHIIGDVAGRDCVMVDDMIDTGGTLCKAAEALKERGAKRVFAYATHPIFSGNAIQNIKNSVIDEFVVCDTIPLAPEIKALDKVRTLTLSGMLAEAIRRISNEESISAMFEH

SEQ ID NO: 229 - protein, 248 aa, Klebsiella pneumoniae
MSAMTLDLPRRFPWPTLLSVAIHGAVVAGLLYTSVHQVIEQPSPTQPIEITMVAPADLEPPPAAQPVVEPVVEPEPEPEPEVVPEPPKEAPVVIHKPEPKPKPKPKPKPKPEKKVEQPKREVKPAAEPRPASPFENNNTAPARTAPSTSTAAAKPTVTAPSGPRAISRVQPSYPPRAQALRIEGTVRVKFDVSPDGRIDNLQILSAQPANMFEREVKSAMRRWRYEQGRPGTGVTMTIKFRLNGVEIN

SEQ ID NO: 230 - protein, 221 aa, Klebsiella pneumoniae
MTQPEAVFFDCDGTLVDSEVICSRAYVHMFQEFGITLDLAEIFKRFKGVKLYEIIDTINAEYGVNLQKATLEPIYRAEVARLFDSELEVIPGAQALLDAVSVPMCVVSNGPVSKMQHSLGRTGLLRHFTDRLYSGYDIQRWKPDPALMFHAAEAMQVKAENCILVDDSSAGAQSGIAAGMEVFYFCADPHNQPIDHPKVTTFTDLAELPALWQARGWDITR

SEQ ID NO: 231 - protein, 380 aa, Klebsiella pneumoniae
VRRLRERGAEVRVAMTEAAKAFITPLSLQAVSGYPVSDSLLDPAAEAAMGHIELGKWADLVILAPATADLIARVAAGMANDLVSTICLATPSPVAVVPAMNQQMYRAQATQHNLQTLATRGLLLWGPDSGSQACGDVGPGRMLDPLTIVDMAAQHFASPVKDLQHLNLMITAGPTREPLDPVRYITNHSSGKMGFAIAAAAAQRGANVTLISGPVSLPTPPFVQRIDVTTALEMEAAVQAGAQQQHIFIGCAAVADYRAAVIAEDKIKKQGDELTIKMVKNPDIVAGVAALKSHRPYVVGFAAETNNVEEYARQKRARKNLDLICANDVSQPNQGFNSDSNALHLFWQDGEKRLPLERKELLGQLLLDEIVTRYDEKNRR

SEQ ID NO: 232 - protein, 454 aa, Klebsiella pneumoniae
MFRLSFMFIALLTAGCVSLDPHYDRPAAPVPATLPGAHGESTAVVGDWQKVVNDARLKKVVSIALNSNRDVQKALADIEAARAQYGETRASLFPTVDAELSHTRSKTVASGLSSASQADGAVSSFELDLFGKNQSLSRAARETWLASEFTAQNTRLTMIADLTTAWVTLATDNSNLALAQQTMDSAANSRNIVAHQMAVGTASAGDLSSAESVYQQARASVASYRTLVAQDKNAINLLAGETVPESLLPGTLESLGDNSIALVPAGVSSSVLLRRPDIQEAEHNLKSANADIGAARANFFPSISLTASAGVGSDSLSSLFSHGMQVWSFAPSISLPLFTGGSNLAQLRYAEAEKKGLIATYEKSIQSAFKDVADALARRETLSEELDAQRQYVAAEQTSLDIAMKSYQAGVGDYLSVLTAQRTLWSAKTTLLSLQQTDLNNRITLWQSLGGGAS

SEQ ID NO: 233 - protein, 513 aa, Klebsiella pneumoniae
MQLNSTEISELIKQRIAQFNVVSEAHNEGTIVSVSDGVIRIHGLAECMQGEMISLPGNRYAIALNLERDSVGAVVMGPYADLAEGMKVKCTGRILEVPVGRGLLGRVVNTLGAPIDGKGPLENDGFSAVEAIAPGVIERQSVDQPVQTGYKSVDAMIPIGRGQRELIIGDRQTGKTALAIDAIINQRDSGIKCVYVAIGQKASTISNVVRKLEEHGALANTIVVVATASESAALQYLAPYAGCAMGEYFRDRGEDALIVYDDLSKQAVAYRQISLLLRRPPGREAFPGDVFYLHSRLLERAARVNAEYVEAFTKGEVKGKTGSLTALPIIETQAGDVSAFVPTNVISITDGQIFLETNLFNAGIRPAVNPGISVSRVGGAAQTKIMKKLSGGIRTALAQYRELAAFSQFASDLDDATRKQLDHGQKVTELLKQKQYAPMSVAQQSLVLFAAERGYLADVELAKIGSFEAALLAYVDRDHAPLMQEINQSGGYNDEIEGKLKGILDSFKATQSW

SEQ ID NO: 234 - protein, 823 aa, Klebsiella pneumoniae
MEHAHPQVDANRVIAADRRLFGFQLPAFPFLIAHPVRGKAFRRGLQQQAQVTVAQSGPRRAKTHKVGGQLRRKIAGVKPPASVIGKTDFSRQQHRAEARHRHRLFSDNPRQQGFTGLGVLRLLPQAPRLQQRPGYPQIRVGRRVAVQQGPLLIVLFAPQPARQMLFQIAFRQVVLRPGQQFVEPCAIVGRQGEKQAIALPFGGGDFARIAGVNHPSLGADVRLFKLLPGGPLAGGAHLARRQQQRREHRATKYFHHGLLIIQAKTAAADDAQHAPQHPCQQHNADGGEDRQQYRVVREREPDALEPGQMTHVVNIPHPQTVDAGFADHRHRAKHRCPLTAVVEGVGQQFISARAVGQQGHHAALIVIRRLEANHRRHRPGRGNVGAGIGRAGLIVGINARQVIVAHRHFHPAFGRLDQQVDFGVVLERRRDRADQQQIRIFVLDLVAIVGHLQINRRQTGLRTDAPQRLQQRRHLALGRRLRHHHQRVGKVRHTAVREARIGEDAQVRQGDKVIILREVDGRIVADHHVVLHRLEGNTVVDGAAGHRVHILEVKAQLVDRPKTQRGDGDLRFAVQQPLQHRQAQDQFVHVLGAVKAERLQELVVEADIHPRAVLHRRHGVAVFQIHIDAVGPQQIEIRRQVKRHGDGIRHQAAGLQLLLIGFQLSKGDRTVGAHPVRRVVRLTRLQGFDAVHGDAAAAEQNIALSNPLRRQQQVVIIAAENHQQLDVGIVRVVDHFDGRRLDRRMIAQEVRTLVVGGEDNGVTIRQFIEIDRELLAAPAGLAAEPGGDYRRRLLLGDRWRARENHRQLQRAVIARIVERHREV

SEQ ID NO: 235 - protein, 397 aa, Klebsiella pneumoniae
VERFDAIVVGAGAAGMFCAAQAGQLGCRVLLLDNGKKPGRKILMSGGGRCNFTNMYVEPTAYLSQNPHFCKSALARYTQWDFIELVGKYGIAWHEKTLGQLFCDDSAEQIVNLLLAECEKGGVQIRLRSEILSVERDEQGYRLQVNGETLMTKKLVIASGGLSMPGLGASPFGYKVAEQFGLKVLPTRAGLVPFTLHKPLLEQLQVLSGVSVPSTITAENGTLFRENLLFTHRGLSGPAVLQISSYWQPGEFVTVNLLPDCDLDDFLNEQRSAHPNQSLKNTLAMQLPKRLVECLQQLGQIPDVTLKQLNVRDQQTLVETLTAWRVQPNGTEGYRTAEVTLGGVDTNELSSRTMEARKAPGLYFIGEVMDVTGWLGGYNFQWAWSSAWACAQALVEG

SEQ ID NO: 236 - protein, 225 aa, Klebsiella pneumoniae
MKQYLIAPSILSADFARLGEDTAKALAAGADVVHFDVMDNHYVPNLTIGPMVLKSLRNYGITAPIDVHLMVKPVDRIIPDFAEAGASIITFHPEASEHVDRSLQLIKEHGCKAGLVFNPATPLSYLDYVMDKLDVILLMSVNPGFGGQSFIPQTLDKLREVRQRIDASGYDIRLEVDGGVKASNIGEIAAAGADMFVAGSAIFGQPDYKQVIDQMRSELAKVSHG

SEQ ID NO: 237 - protein, 834 aa, Klebsiella pneumoniae
VENPSQPAQSGNSGENGAGGWDVMKRLTTLALLAGMLSAPALHSEEPGSGAAAPLSFPQLNDAADSEPGDEPPAASPEEGASPAAPATAGDAAATAPAPVMPDLPPPVSGTAAPEVIPVAPVWGGDLNLAQMGMPDGIILSGGQRQGGVSFTLPADQVVIHSQLSLAVRVSPEMASRNATLQLMLNGQPLGTLPLGADGEDVSHYQLDIPPALMVSSNNLSVKINDGDTLQCQRDIHDTSRVTVLPTSHFSWESQQLNISDDLSHFPRPFFDSMQMTPADIAVAYGAKPSADVFSAAALISSWLGIQADYRGIAFSALRDRLPERHGIVIGHPGEQVGGMMLPETDKPLLRIIANPANPAYKLLLIVGKNDTALRMAAWRLTRGNFAPQTATLDVEPQTIPVGKAYDAPRWIPTDRPVKLSELLRKDQSPTVSGVWHEPLRIAFRAAPDLYLWDGETIPLQVGYRFPSESWINEDKSLLSVTLNGTFLNNLPMNKQGPLEKVWRYLGGDARQERFTIPLAPYLIYGDNQLSMYFNVVPKDDVPCSVLLNNNIKSRITDDSWIDLSKTRHFSLLPNLSYFVGASFPFSRLADYSQTTLLLPADPSETQVATLLNLAARSGNATGTALANNRVVLGMPTGGGDLQSLRERDVLAVTALDQQAFNQSLLADSPYRPVDNVLSVREPDLWQKVQRRLTGDWTSASLDADRYFSSSSAWRGFISYRSPWNSTRLVVVALASNDDQLARLKTDLESPRINAGIRGDTAVITSDNGVRSFQVSTPFPSGQMPWYMMAVWYASQHSGFLAVLGLIATSIMGLALTAMFKRHARKRLGSGDNQ

SEQ ID NO: 238 - protein, 137 aa, Klebsiella pneumoniae
MRPWCTSKAKSKTAYRRCRLTGNCIVKKWPDRSPTVFTNVRPKESTMLINLGRLLMLCVWAFLLLNLFQPFPKPLNIFVNVALIFMILMHGLQLTLLKATQPKEAPPLSRFEQIRIFIFGVFELVAWQKKLKATLKK

SEQ ID NO: 239 - protein, 167 aa, Klebsiella pneumoniae
MAHIEKQAGELQEKLIAVNRVSKTVKGGRIFSFTALTVVGDGNGRVGFGYGKAREVPAAIQKAMEKARRNMINVALNHGTLQHPVKGTHTGSRVFMQPASEGTGIIAGGAMRAVLEVAGVRNVLAKAYGSTNPINVVRATIDGLENMKSPDMVAAKRGKSVEEILGK

SEQ ID NO: 240 - protein, 847 aa, Klebsiella pneumoniae
MSKVRIAIIGNGMVGHRFIEELLDKAPAGQFDITVFCEEPRIAYDRVHLSSYFSHHTAEELSLVREGFYEKHGVKVLVGERAITINRQEKVIHSSAGRTVFYDKLIMATGSYPWIPPIKGAETQDCFVYRTIEDLNAIESCARRSKRGAVVGGGLLGLEAAGALKNLGVETHVIEFAPMLMAEQLDQMGGEQLRRKIESMGVKVHTSKNTKEIVQQGTEARKTMHFADGSELQVDFIVFSTGIRPRDKLATQCGLAVAQRGGIMVNDSCQTSDPDIYAIGECASWNNRVYGLVAPGYKMAQVAVDHLLGSENSFTGADLSAKLKLLGVDVGGIGDAHGRTPGARSYVYLDESKEVYKRLIVSADNKTLLGAVLVGDTSDYGNLLQLVLNAIELPENPDSLILPAHAGSGKPSIGVDKLPDSAQICSCFDVSKGDLIAAINKGCHTVAALKAETKAGTGCGGCIPLVTQVLNAELAKQGIEVNNNLCEHFAYSRQELFHLIRVEGIKTFDELLEKHGQGYGCEVCKPTVGSLLASCWNEYILKPQHTPLQDSNDNFLANIQKDGTYSVIPRSAGGEITPEGLVAVGRIAREFNLYTKITGSQRIGLFGAQKDDLPEIWRQLIEAGFETGHAYAKALRMAKTCVGSTWCRYGVGDSVGFGVELENRYKGIRTPHKMKFGVSGCTRECAEAQGKDVGIIATEKGWNLYVCGNGGMKPRHADLLAADLDRETLIKYLDRFMMFYIRTADKLTRTAPWLDNMEGGIDYLRSVIIDDKLGLNDHLEEELARLRAAFACEWTETVNNPAAQTRFKHFINSDQRDPNVQVVPERDQHRPATPYERIPVTLVEEKA

SEQ ID NO: 241 - protein, 1663 aa, Klebsiella pneumoniae
VTNCIRLIGRGVRRMKPFRLAALSLALLTAFSLTGCDDSGTPQASAPAPAADSNPGATAKPDRAQLAALAEKSQGKALTLLDASEVQLDGAATLVLTFSVPLQPDQDFSRSVHLVDKKSGKVDGAWELAPNLKELRLRHLEPKRELIVSVDPTLTALNKATLDKPFEKTLTTRDIAPSVGFASRGSLLPGNVVAGLPVMALNVDNVDVNFFRIKPESLSAFVSQWEYRNSLSNWESDELLKMADLVYSGRFDLNPARNTREKLLLPLSDIKPLQQPGVYVAVMNPAGRYSYSNAATLFTLSDIGVSAHRYHNRLDVFTQSLENGAAQSGIEVQLLNAKGQTLAEAKSDSQGHVTLQTDKEAALLLARKEGQTTLLDLKLPALDLAEFSIAGAPGFSKQFFMFGPRDLYRPGETVILNALLRDSDGKPLAEQPVKLEVVQPDGQVIRSVMSKPVNGLYQFTYPLDSGAATGMWHIRASAGDNQPREWDFHVEDFMPERMALNLTPQAAPVAPDADVTFGVSGAYLYGAPASGNQLQGKLFLRPLRDAVAALPGFQFGDIAEENLSRSLDEVQLTLDEKGHGEVTTSSQWQDSHSPLQVVLQASLLESGGRPVTRTVKQPIWPAEALPGIRPQFTLKDVYDYRTDTTVKQPVVDENSNAAFDIVYADVKGEKKAISGLQVRLIRERRDYYWNWSDSEGWQSQFDQKDLQEGEESLDLQAGQIGKVSFPVEWGSYRLEVKGPDDVVSSVRFWAGYSWQDNSEGAGAARPDRVTMKLDKPSYKPGDTIRLHIAAPAAGKGYAMVESSEGPLWWQEIDVPAEGMDLSIPVDKTWNRHDLYLSTLVVRPGDKSRSATPKRAVGLLHLPLGDENRRLTLALEAPDKMRPNQPLTVKVKASVKEGEAPKQVNVLLSAVDSGVLNITDYATPDPWNAFFGQKRYGADIYDIYGQVIEGQGRVASLRFGGDGDELKRGGKPPVNHVTIVAQQAQPVVLNDQGEGTVTLPIGDFNGELRVMAQAWTADDFGSSEDKVVVAAPVIAELNTPRFLASGDTTRLALDLSNLTDKPQTLQVHLTASGLVTLTEGQLPPVQLAPGARSTLFIPVSALAGFGDGQVNATISGLSLPGETFAPLQKQWKIGVRPAYPAQTVNSGAVLQPGESWQPPAAQSQGFAPQTLQGQLLLSGKPPLNLARYIRELKAYPYGCLEQTASGLFPSLYTSAAQLKALGISGDSDEKRRAAIDVGISRLLQMQLENGGFALWDREGPEEYWLTAYAMDFLVRASEQGYSVPVNAINKGNERLLRYLQEPGLMTVRYSDDAQASRFAAQAYAALVLARQQKAPLGALREIWSRHDQARSGLPLLQLGIALKTMGDAPRGDAALKLAVATPRQDENRWLGDYGSPLRDNALKLALLEENKLLPEVQNQLLSTLSEEAYGQRWLSTQETNALFLAGRTLADLPGSWQAKTSLQAEPLAGDKAQTRNLDGDRLAALQVSNTGSQPLWLRLDSSGYPQSAPQPGGNVLGIERTIFDTQGQQKSLSSLRSGELVLVKLEVTAKRNVPDALVVDLLPAGLELENQNLANSSASLQENGDAVQNLLNQMQQADIQHIEFRDDRFVAAVAVNEGQPVTLVYLARAVTPGTYQVPQPQVESMYAPQWRATGAASGPLTVTP

SEQ ID NO: 242 - protein, 245 aa, Klebsiella pneumoniae; identical to SEQ ID NO: 195

SEQ ID NO: 243 - protein, 217 aa, Klebsiella pneumoniae
VINLNGNSSSSRQVTFITHPSIQSKAFASYLSETLMAPVVLQNINKPLAQRLAKDSVILFDIAVSNKKLNGVWRDIIRLQADNPRLLIINSAQKYELYEMAQWPALYGVFRHDDDESRLIEGVKAVLNGEQTAELSVMHPAMYAADHASTPVENSPLTERECEILNELRCGATNLDIARALFISENTVRTHLYNVFRKLSVKNRTQAVSWANEHLRH

SEQ ID NO: 244 - protein, 384 aa, Klebsiella pneumoniae
MAKHLFTSESVSEGHPDKIADQISDAVLDAILEQDPKARVACETYVKTGMVLVGGEITTSAWVDIEEITRNTVREIGYVHSDMGFDANSCAVLSAIGKQSPDINQGVDRADPLEQGAGDQGLMFGYATNETDVLMPAPVTYAHRLVQRQAEVRKNGTLPWLRPDAKSQVTFQYDDGKIVGIDAVVLSTQHAEDIDQKSLQEAVMEEIIKPILPTEWLNASTKFFINPTGRFVIGGPMGDCGLTGRKIIVDTYGGMARHGGGAFSGKDPSKVDRSAAYAARYVAKNIVAAGLADRCEIQVSYAIGVAEPTSIMVETFGTEKVPSEQLTLLVREFFDLRPYGLIQMLDLLHPIYKETAAYGHFGREHFPWEKTDKAALLREAAGLK

SEQ ID NO: 245 - protein, 490 aa, Klebsiella pneumoniae
MPRKFCSGLAFAIATSEAPIPKPISKVTGASRPNRAAKSSGASLNSTPITGQMLSSACCCPFVRRPWRRTKLRIRRSGRPFSSNSGEMTSFFIKVWSACECVRKTGIIQSYSADARVYSHSPLCCNLPPCNRDPGAVALTFLATQFSAQVLDWYDKYGRKTLPWQIAKTPYKVWLSEVMLQQTQVTTVIPYFERFMARFPTVVDLANAPLDEVLHLWTGLGYYARARNLHKAAQQVATLHGGEFPRTFDEVAALPGVGRSTAGAILSLSLGQHYPILDGNVKRVLARCYAVSGWPGKKEVEKRLWDISEEVTPAEGVERFNQAMMDLGAMVCTRSKPKCELCPLSNGCVAYANHSWAEYPGKKPKQTLPERTGYFLLMQHGDEVFLSQRPPVGLWGGLFCFPQFADEAELREWLAQRQIKADNLTQLTAFRHTFSHFHLDIVPMWLTVHSSGACMDEGNALWYNLAQPPSVGLAAPVERLLQQLKAGAPV

SEQ ID NO: 246 - protein, 98 aa, Klebsiella pneumoniae
VTYWSPVSAWDVWGLAIRQRVSIAGRWTKQPAGTSSATLWNRASIFTIPPSPIRTAPANGTLAGRCGRWQNARRWCWPPSFCHEPPRRLPRGSAENRL

SEQ ID NO: 247 - protein, 703 aa, Klebsiella pneumoniae
MYMTCRLGYIVHTFFRRSPKRALVKSLRAWPSTVRTGVKMSSRKELANAIRALSMDAVQKAKSGHPGAPMGMADIAEVLWRDFLNHNPNNPAWADRDRFVLSNGHGSMLIYSLLHLTGYDLPIEELKNFRQLHSKTPGHPEVGYTAGVETTTGPLGQGIANAVGMAIAEKTLAAQFNRPGHDIVDHYTYAFMGDGCMMEGISHEVCSLAGTLKLGKLVAFYDDNGISIDGHVEGWFTDDTAKRFEAYGWHVVRGVDGHDADAIKRAVEEARAVTDKPSLLMCKTIIGFGSPNKAGTHDSHGAPLGDAEIALTREALGWKHAPFDIPSDIYAQWDAKEAGQAKEAAWNEKFAAYAKAFPQEAAEFTRRMKGEMPSDFDAKANEFIAKLQANPAKIASRKASQNAIEAFGPLLPEFLGGSADLAPSNLTLWSGSKPINEDAAGNYIHYGVREFGMTAIANGIALHGGFLPYTSTFLMFVEYARNAVRMAALMKQRQVMVYTHDSIGLGEDGPTHQPVEQVASLRVTPNMSTWRPCDQVESAIAWKYGVERQDGPTALILSRQNLAQQERTAEQLANVARGGYVLKECTGSQPELIFIATGSEVELAVAAWDKLTAEGVKARVVSMPSTDAFDKQDAAYRESVLPKAVTARVAVEAGIADYWFKYVGLNGAIVGMTTFGESAPAEQLFEEFGFTVDNVVAKAKALL

SEQ ID NO: 248 - protein, 253 aa, Klebsiella pneumoniae
MPVFRTHSQADQTFMKNDVISPEFDENGRPLRRIRSFVRRQGRLTKGQQHALDNIWPVMGVEFNDAPLDFAALFGRDAPVTLEIGFGMGASLVAMAKAKPEQNFLGIEVHSPGVGACLASAEEEGVQNLRVMCHDAVEVLHTMIPDNSLNMVQLFFPDPWHKARHNKRRIVQPPFAELVKSKLKLGGVFHMATDWEAYAVHMLEVMSSLEGYRNQSASNDYVPRPESRPVTKFEQRGHRLGHGVWDLMFERVK

SEQ ID NO: 249 - protein, 480 aa, Klebsiella pneumoniae
VSQSVLVLGASGYIGQHLVRELSARGYPVLAAARHIDRLQKLALPGVTCRSVDLNQPQDLPALLTGIDTLYYLVHGMGEGGDFIAHERRVATYVRDALRQSSVRQVIFLSSLQAPAQEQSDHLRARQITGDLLRESGVPVTELRAGIIVGAGSAAFEVMRDMVYNLPVLTPPRWVRSRTTPVALENLLVDLVELLNHPSDAHRVFEAAGPEVLSYQQQFIRFMAVSGKHRPLIPIPLPTRWISVWFLNVITSVPPTIAKALIQGLKHDLIADDRALRALIPQTLIPFDQAVRRTLKEEEQLVNSSDWGYDAQAFARWRPEYGYYPKQAGCTVATQASRQALWQVVNQIGGEEGYFFGNLLWKTRGAMDLLVGHRLAKGRPQRAYLQTGDTVDSWKVIIVEEEKQLTLLFGMKAPGLGRLSFTINDKGDRRELDVRAWWHPHGMPGLIYWLLMIPAHLFIFRGMAQRIARLAEQISGRVEG

SEQ ID NO: 250 - protein, 381 aa, Klebsiella pneumoniae
MSLNMFWFLPTHGDGRYLGTEEGARPVDYGYLQQIAQTADRLGFTGVLIPTGRSCEDAWLVAASMIPVTQRLKFLVALRPSVVSPTVAARQAATLDRLSNGRALFNLVTGSDPAELAGDGVFLDHTERYEASAEFTHIWRKLMEGETVTFNGKHQRVRDAKLLFPPLQQPRPPLYFGGSSEVAQELAAEQVDLYLTWGEPPAQVAEKIAQVREKAARHGRQVRFGIRLHVIVRETNEEAWQAADSLISHLDDETIARAQAAFARTDSVGQQRMAALHNGRRDKLEISPNLWAGVGLARGGAGTALVGDAATVAERINEYAALGIDSFIFSGYPHLEEAYRVGELLFPLLDVAVPSIPQPQNLRLQGEAVANEFIPRKVAQS

SEQ ID NO: 251 - protein, 182 aa, Klebsiella pneumoniae
VAFAGRSNAGKSSALNTLTNQKNLARTSKTPGRTQLINLFEVAEGKRLVDLPGYGYAQVPEEMKIKWQRALGEYLEKRLCLKGLVVLMDIRHPLKDLDQQMIEWAVESDIQVLVLLTKADKLASGARKAQVNMVREAVLAFNGDVQVEPFSSLKKSGVDKLRQKLDSWFNEIPPQEAVEDAE

SEQ ID NO: 252 - protein, 328 aa, Klebsiella pneumoniae
MKTKTSLILTVAALALSGSALAEVKIALVAKSLGNGFFEAANVGAQQAAKELGDVKVIYTGPTTTTAEAQIDVLNGLIAQGVDAIAISANDPDAVVPVLKKAMQRGIKVVSWDSGVAPAGRQIHLNPSNNALIGETNVKLAADALQALNVEKGEVAVLSATPTSTNQNIWIEEMKKVLPQYPSVQLVTVAYGDDLSDKSYREAVGLLKSYPDLKVIVSPSSVGIVAAAQAVKDQGKIGKVYVTGLGLPSEMAGAIKSGASKSFAIWNPIDLGYAATYLADDLVKGTATKTEASMGKLGKVNLDAEGNGAMAKPFVYDASNIDKFSKIF

SEQ ID NO: 253 - protein, 146 aa, Klebsiella pneumoniae
MLGWVITCHDELAQEMLDRLEQKFGPLAQCRAVNYWRNLSSNMLSRMMCDALHATDSGDGVIFLTDKTGAAPYRAAALMSHKHTHCEVISGVSYPLLERMYLLRGTLSSVAFRQAIVSAGGPMVSSLWHQQQKNPPFRLRHDAWGN

SEQ ID NO: 254 - protein, 221 aa, Klebsiella pneumoniae
VPVQCKGFLFDLDGTLVDSLPVVERSWCKWGDRFAIDHDEILSFIHGKQAITSIRHFMPGRSEEDIQAEFRYLEQIEATDIEGIVALPGALALLNTLNEAGIPWAIVTSGSIPVAHARHRAAGLPMPEVFVTAEQVKHGKPAPDAYLLGAERLGLPAGECAVVEDAPAGLLSGLAAGCRTIAVNVPADAPRLDEADLVLSSLEDLVVERQTDGVVNVRLKA

SEQ ID NO: 255 - protein, 229 aa, Klebsiella pneumoniae
VASKFQNRLVGTIVLVALGVIILPGLLDGQKKHYQDEFAAIPLVPKPGDRDEPDMLPAATQALPSQPPEGAAEEVRAGDAAAPSLDPSRIPVNSNSFDDVQEPVVAAKPQPKPQPKPQPQQQASTPTPPPAKPQQQQPPQQQAALPAPTGKAYVVQLGALKNADKVNEIVGKLRASGFKVYTSPSTPVQGKITRILVGPDASKDKLKGQLGDLQQISGLSGVVMGFTPN

SEQ ID NO: 256 - protein, 257 aa, Klebsiella pneumoniae
VAILFYQGTSSMRKIALFIAMLLLPCVSFAGLLSSNSPTTPVSKEYKQQLMGSPVYIEIFKEERMLDLYVKMGETYQLLDSYRICNYSGGLGPKQRQGDFKSPEGFYNVTRSQLKPDSRFYKAINIGFPNAYDRAHGYEGKYLMIHGDCVSVGCYAMTDSGIDEIFQFVTGALVFGQPSVQVSIYPFRMTNANMERHKYSYYADFWKQLKPGYDYFQQTHKPPVVSVTDGRYVVSKPLSHEVVQPQLASNYTLPETK

SEQ ID NO: 257 - protein, 455 aa, Klebsiella pneumoniae
MKARAILLASVLLVGCQASKHDGTVEQRAQSLSAAGQGEAGKFTSQARWLDDGTFYAQDQDLWTSIGDELKMGIPDNPRIREQKQKYLRNKSYLHDVTLRAEPYMYWIAGQVKKRNMPMELVLLPIVESAFDPHATSGANAAGIWQIIPSTGRNYGLKQTRSYDARRDVVASTTAALDMMQRLNKMFDGDWLLTVAAYNSGEGRVMKAVKANRSRGKPTDFWSLSLPHETKIYVPKMLALSDILKNSKRYGVKLPTADESRALARVRLDSPVDISQLADMAGMPVSKLKTFNAGVKGSTLGASGPKYVMVPQKHAAQLRESLASGDIAAVQPTQLADNTPLTSRSYKVRSGDTISGIASRLGVTTRDLQQWNNLRGSGLKVGQNLVIGAGSSAQRLANNSDSITYRVRKGDSLSSIAKRHGVNIRDVMRWNSDTDNLRPGDQLTLFVKNNDRPES

SEQ ID NO: 258 - protein, 402 aa, Klebsiella pneumoniae
FSDTQTHLRFGAHDFTAQRVGVYIDDFDIDKLTDEVRGTFEVDHPVILRTSGKLHDVLTRGAFHQDALYRAEHATAPGHRLLVNAFLQDIQTLFFVRLRHVVDHIGRRGARASGEDKAVAHIEIDVGDELHGLFEIFRGFAGEADDKVGAYLNIRARFTQLANNRFILQRGMGASHQVQHTVGATLHRQVQEAHQLRRIAINVDDIVGKFDRVAGGEANAVDAVDGGDQAQQVGKAAGGAVVILTAPGVNVLPQQIDLTHTLRRQLGDFKQDIVARTANFFSAGIRHHAVGAVFIATFHNRDKGGRPFGARLWQAIEFFNFREADINYRTAVAAHGVNHLRQAVQGLRPENNIDIVRALANMVAFLGSHAAADANNQVRVLLFQQLPAAKLMENFFLGLLTN

SEQ ID NO: 259 - protein, 512 aa, Klebsiella pneumoniae
MVFASLLERQRVRLLLALLFGASGTLAFSPYDFWPAAIVSLIGLQALTLNRRPLQSAGIGYFWGLGLFGTGINWVYVSIAQFGGMPGPVNVFLVVLLAAYLSLYTGLFAGLLARLWPKTNWIRMAIAAPVVWQITEFLRGWVLTGFPWLQFGYSQIDGPLKGLAPVMGVEAINFLLMVVSGLLALALVQRNWKPLAIAALLFALPFPLRYIQWYQLLPARATQVSLVQGDIPQAMKWDEKQLVNTLKTYLALTQPHIGHSQLIIWPESAIPDLEINQQQFLSMMDDLLRAKDSSLITGIVDARLNKQNRYDTYNTIITLGKDNPYRYDSTNRYNKNHLVPFGEFVPLESILRPLAPFFDLPMSSFSRGPYVQPQLMAHNLKLTAAICYEIILGEQVRDNFRPDTDFLLTISNDAWFGKSIGPWQHFQMARMRALELARPLLRSTNNGITAVIGPRGEIQKMIPQFTREVLTTTVTPASGLTPYARTGNWPLWALTALFGFAALLMSLRQRRR

SEQ ID NO: 260 - protein, 310 aa, Klebsiella pneumoniae
MLKFIRAGMYTSVQDGGREGQRQWGISRCGALDKPAMTIANLLVGNAPEAAALEITLGQVDVQFTRHCWFALTGAACEATLDGAPVWLGWRMEAKAGQRLVLKNPQHGIRSYLAVAGGIDVPEVLGSRSTDLKVGIGGIEGRRLQDGDQVKIGKSSRRFSSSRGVKQLPIGNIIRALPGPEYHEFDSVSQESFWRSPWKLSPQSNRMAYRLQGQPLRRTTDREMLSHGLLPGVVQVPHNGQPIVLMNDAQTTGGYPRIACIIEADIYQLAQIPLGQPIHFVPCSLEEALKARADQQRYLEQLAWRLSDEN

SEQ ID NO: 261 - protein, 760 aa, Klebsiella pneumoniae
MRAAFPESSSLPFRQRLLYLPVYVATEVPMPWILLLLAALFTAPLSAATLPGVPTANTDKNSASEPDVEQKRAAYAALADVLANDSARQELIDQLRKAAATPPPDSTPTLTPPAVKEETTVLENVTQISREYGEQLSSRFSQLWRNITGSPHKPFNPQTFTSAAWHFLLLAGLVFAFWWLVRLAALPLYRKMGEWGRHKNRDRGNWLQLPLTIAGAFIIDLLLLALTLFVGQLLSDRLNGNNPTIAFQQSLFLNAFALIEFFKAILRLIFCPRIPALRPFNLSDEAASYWSLRLSALSSLIGYGLIVAVPIISNQVNVQVGALANVVIMLCITLWALYLIFHNKAVITQGLIHLADHSLAFFSLFIRAFALVWHWLACAYFVVLFFFSLFDPGNSLKFMMGATLQSLAIIGGAALVSGILSRWIAKTITLSPATQRNYPELQKRLNGWISASLKAARILTVCVAIMLLLSAWGLFDFREWLHNDAGQKTVDVLIRIALILFFSAIGWTVLASLIENRLASDIHGRPLPSARARTLLTLFRNALAVVISTITVMILLSEIGVNIAPLLAGAGALGLAISFGAQTLVKDIITGIFIQFENGMNTGDLVTIGPLTGTVERMSIRSVGVRQDTGAYHIIPWSSITTFANFVRGIGSVVANYDVDRHEDLDKASQALKAAVDDLLAQEEIRGLIIGEPSFAGLVGLSNTAFTLRVSFTTLPLKQWTVRFALDTQVKKHFDRAGVRAPVQTWQQLPMPGADSPAAE

SEQ ID NO: 262 - protein, 769 aa, Klebsiella pneumoniae
MKKQHNYTVMHWGTWQVESREGEIVAVKPVPWDKNPSRIGQSLPDAVTSQTRIRRPAVRAGYLQHGPASREGRGKEPFVEVSWEVALDLLARELRSVKARCGNEAIYGGSYGWASAGRFHHAQSQLHRFLKGFGGYTASTNTYSSAAGERILPHILGPLSPLHRQHTHFSELARECQLFVAIGGLPLRNAQVNGGGANDHMLQYWLDKMQANGTRFINISPVRNDLSAVPDAEWLAIRPGTDIALLLALSYVLIAESLYDQAFVASHTVGFAPYRAYLLGEHDGVAKTPAWAAAITGLDAQRIADLAREMARHRTMVNISWSIQRARQGEQAYWATVALTALLGQLGTPGGGLGFGYACTNLAGAVRKAFSGPRLPAGENAVDSVIPVARLSDMLLHPGETYEFDGQQRRYPDIRLVYWAGGNAFHHHQDINRLCEAWRRPETVVVHEQYWTAQAKFSDIVLPATTSLEREDIGSGGHDGFMIAMSAQIPPVGEARDDYAIFCDLAGRLGFGEAFSEGRDAGQWLRHLYEESRPRAQEEGIALPSFDDFWQQGVLEYSAPERPQIFLADFRADPQRYPLSTPSGKIELFSATVAGFGYRECPGHPWWDEQEAARQRQEAARWPLHLLSSQPRARLHSQYDHGSVSRATKVQGREPLWMHPSDAQARDIREGSVVKVYNDRGAILAGVHLSEQILPGVVQMSTGAWYDPLDPKEERSLDKHGNPNVLTEDRGSSRLGQGCSAQSCWVEIAPWREELPPITAFDPPKFIEV

SEQ ID NO: 263 - protein, 248 aa, Klebsiella pneumoniae
MKSVFKVSLAALTLAFAVSSHAANKTLVVATDTAFVPFEFKQGDKYVGFDVDLWAAIAKELKLDYTLKPMDFSGIIPALQTKNIDLALAGITITDERKKAIDFSDGYYKSGLLVMVNANNNDIKDVKDLNGKVVAVKSGTGSVDYAKANIKTKDLRQFPNIDNAYMELGTGRADAVLHDTPNILYFIKTAGNGKFKAVGESLEAQNYGIAFPKGSDELREKVNGALKTLRDNGTYNEIYKKWFGTEPK

SEQ ID NO: 264 - protein, 421 aa, Klebsiella pneumoniae
MAALPTHETLPADHKAAIRQMKQALRAQIGDVQAVFDKLSARISERLQEIETLKAAGQEVWPTVPFRDIAEGTVSDEQRAAIKRRGCAVIKGHFPREQALAWDTAMLEYLDRNHFDDVYKGPGDSFFGSLEASRPEIYPIYWSPSQMQARQSDEMAAVQSFLNRLWRFEQNGKRWFDPDVSVIYPDRIRRRPPGTTSKGLGAHTDSGALERWLLPAYQQVFANVFNGNIDAYDPWDAAHRTEVEEYTVDNTTKCSVFRTFQGWTALSDMIPGQGLLHVVPIPEAMAYVLLRPLLDDVPEDELCGVAPGRVLPISEQWHPLLIKALSSIPALNAGDSVWWHCDIIHSVAPVENQQGWGNVMYIPAAPMCEKNLAYAQKVKIALEKGASPGDFPREDYEASWQGRFTLEDLNIHGKRALGMPV

SEQ ID NO: 265 - protein, 323 aa, Klebsiella pneumoniae
MADFPPVASLRSFEAVARLGSVTQAAHEMSVTHSAVSQHIKQLEALVGVTLFIRHGRGVRITEEGRLYALQIREALQHIADATRMVQIKPRTLEVTLATIPSFGCHWLLPRLARFQARHPQIAVRLLTSLAVVNLQQEGIDLAIRMGQGDWEGMESRHLFADEQLVVAAPGYRGGNLPTTPQAIAASDIIFSMESWHAWCSQAGLEKPIVPAGLRLNDSNLVLEAVRLGAGVALERRSLVAGAIARGELVQLTAVTVPYPWHYWLTVSPQAENRPEVARFIAWLEEEIALWRQQISAYLRRRRQAVRAACSWERRQKSCPAGY

SEQ ID NO: 266 - protein, 221 aa, Klebsiella pneumoniae
MRNQPLGNLAAGAVDHVNHPIRDTHRFCQLRHAQQRQRRIFARLEDDGAAADQGRRQLPDGNHDGEVPRHDANHHPQRLAAGKGGIFLPGHRWQRDIQRFTGDFPRPAGEVAQERHRLVQLEHPRQRDSFAGTETFQLRQRFAMLCQRVRQLQQQRAARQRRHLAPLTKRLAGALHSAIRLVTIRRGDLGNRPPGRRVDHRERRAAARLTLTGNKLPVRLA

SEQ ID NO: 267 - protein, 335 aa, Klebsiella pneumoniae
MRFIWLYTELKNAPTLKTYSAAVDWNVPGHYFAETFSRSGMNPSGQSIRGEIMKKSLASMCLSAVLTVAFSYHAVAADLPEIEKSGTLKVATEDDYAPFNFMNNGQADGFNKDMLEELRKYAKFHVDQSILPWTGLLAAVSTGQYDMALTGAVITDERLKVFDFTPPWASAQHYFVKRAGDTSLNTIADLSGKKVGVQAGSALLARLPELKAMLEKTGGKLGPVVEYPSYPEAYADLANKRLDYVINVVISVNDLAKAKPKVFAKGLAVSGPGYMAWPIPKNSPQLLAYMTRFMNHMKETGKLAELQKKWFGETYDNLPTEAITSPEQFHKLAGL

SEQ ID NO: 268 - protein, 633 aa, Klebsiella pneumoniae
MKLQNSFRDYTAESSLFVRRALVAFLGILLLTGVLIANLYNVQIVRFDDYQTRSNENRIKLVPIPPSRGIIYDRNGTPLALNRTIYQLEMMPEKVDNVQQTLDALRDVVDLTDDDIAGFKKERARSHRFTSIPVKVNLSEVQVARFAVNQYRFPGVEVKGYKRRYYPYNSALTHVIGYVSKINDKDVDRLDKEGKLANYASTHDIGKLGIERYYEDVLHGQTGYEEVEVNNRGRVIRQLKEVPPQAGRDIYLTLDLKLQQYIETLLAGSRAAVVVTDPRTGAILALVSTPSYDPNLFVDGISSKDYSALLNDPNTPLVNRATQGVYPPASTVKPYVAVSALSAGVITRNTSLFDPGWWQLPGSEKRYRDWKKWGHGHLNVTKALEESADTYFYQVAYDMGIDRLSEWMSKFGYGHYTGIDLSEERSGNMPTREWKLKRFKKPWYQGDTIPVGIGQGYWTATPIQMNKALMILINDGVVKVPHLLQSTVEDGKPVPWVQPHEPPVGDIHSGYWEIAKDGMYGVANRGNGTAHKYFASAPYKIAAKSGTAQVFGLKANETYNAHRISERLRDHKLMTAFAPYNNPQVAVAMILENGGAGPAVGTIMRQILDHIMLGDNNTTLPSENPAVTAGEDQ

SEQ ID NO: 269 - protein, 742 aa, Klebsiella pneumoniae
MNNRIKSLALLVNLGIYGVAFPLSAAETATDDKNSAAEETMVVTAAEQNLQAPGVSTITADEIRKRPPARDVSEIIRTMPGVNLTGNSTSGQRGNNRQIDIRGMGPENTLILIDGKPVTSRNSVRLGWRGERDTRGDTSWVPPEMIERIEVIRGPAAARYGNGAAGGVVNIITKKTGDEWHGSWNTYMNAPEHKDEGSTKRTNFSLSGPLGGDFSFRLFGNLDKTQADAWDINQGHQSERTGIYADTLPAGREGVKNKNIDGLVRWEFAPMQSLEFEAGYSRQGNLYAGDTQNTNSNDLVKENYGKETNRLYRNTYSVTWNGAWDNGVTTSNWAQYERTRNSRKGEGLAGGTEGIFNSNQFTDIDLADVMLHSEVSIPFDYLVNQNLTLGSEWNQQRMKDNASNTQALSGGEIPGYDSTGRSPYSQAEIFSLFAENNMELTDTTMLTPALRFDHHSIVGNNWSPSLNLSQGLWDDFTLKMGIARAYKAPSLYQTNPNYILYSKGQGCYASKDGCYLQGNDDLKAETSINKEIGLEFKRDGWLAGVTWFRNDYRNKIEAGYAPVYQNNKGTDLYQWENVPKAVVEGLEGTLNVPVSETVNWTNNITYMLQSKNKETGDRLSIIPEYTLNSTLSWQVRDDVSLQSTFTWYGKQEPKKYNYKGQPVTGSEKNEVSPYSILGLSATWDVTKYVSLTGGVDNVFDKRHWRAGNAQTTGGATGTMYGAGAETYNESGRTWYLSVNTHF

SEQ ID NO: 270 - protein, 203 aa, Klebsiella pneumoniae
TQVAKRVPQFTAVILHHLQRTTDVDCAGFIRIVIGRERTQAVLYCPLTLEKGQHLPPGADKRFGKIFSVLALADNGSQVGFHRLGATAFALGARLVGIVQPHGAAGDGRGAAELAGFLQHQHRQPFTAGGDRGGKTGRAAADDDHIPALHAAAPCACGMAPINWPISLICASAISGPVCTLQPRAAAKVSNGVITGAVTTSAT

SEQ ID NO: 271 - protein, 313 aa, Klebsiella pneumoniae
MRGVIQQTLCQQMTHFSRPAVNSTAALVLRSLSDEPETRAQTVILYVFIRSPMTSSLSRHPAFLSLQGGINFRDLGGQLAADGRRVRSGKLLRSGALNRLTAEDLNHLDTLPLSRVLDYRDPGEVARTPDKLSPLTHYLNAPANPPVSEVNAKVTELNAATLNALNGEQFMLQLYRQLPFNNPAYRQLAAWLTTPFEGALLQHCAVGKDRTGVGCALTLFAVGCDSETVMEEYLLTHGMLTQVEAWMLELLGNDLTAQGRQSLADILTVKESYLAAALSAIHQRYGTVDAWLAAEYQLTAPVRAALQARLLEE

SEQ ID NO: 272 - protein, 473 aa, Klebsiella pneumoniae
MISARWRCSGWVPVWVPRYSVLPLPPSSPGAMPSNGRPRSPHNRLTNKEEDMMPARHQGLLRLFIACALPLLALQSAAAADWQLEKVVELSRHGIRPPTAGNREAIEAATGRPWTEWTTHDGELTGHGYAAVVNKGRAEGQHYRQLGLLQAGCPTAESIYVRASPLQRTRATAQALVDGAFPGCGVAIHYVSGDADPLFQTDKFAATQTDPARQLAAVKEKAGDLAQRRQALAPTIQLLKQAVCQADKSCPIFDTPWQVEQSKSGKTTISGLSVMANMVETLRLGWSENLPLSQLAWGKITQARQITALLPLLTENYDLSNDVLYTAQKRGSVLLNAMLDGVKPEANPNVRWLLLVAHDTNIAMVRTLMNFSWQLPGYSRGNIPPGSSLVLERWRNAKSGERYLRVYFQAQGLDDLRRLQTPDAQHPMLRQEWHQPGCRQTDVGTLCPFQAAITALGQRIDRSSAPAVAMVLP

SEQ ID NO: 273 - protein, 1030 aa, Klebsiella pneumoniae
MLTFFIRRPRFAMVIALLLTFVGAVSLKLIPVEQYPAITPPVVNVSASWPGASASDVAEAIAAPLETQLNGVDHMLYMESTSSDEGTYRLSITFAAGTDADLAAIDVQNRVAQALAQLPAEVQQNGVQVRKRASNLLMGVSLYSPLGTLSPLFVSNYASTQVREALARLPGVGEVQMFGARDYSMRIWLRPDRMNALNITTDDVAQALREQNVQGAAGQVGTPPVFNGQQQTLTINGLGRLNEAASFGEIIIRRGAQGQLVRLADVATIELGARSYSSGAQLNGKASAYLGIYPTPTANALQVASAVRAELNRLHTRFPADLTWEVKFDTTRFVAATIKEIGVSLALTLLAVVVVVSLFLQSWRATLIVVLAIPVSLIGTFAVLYLLGYSANTLSLFAIILALTMVVDDAIVVVENVETKMAEGLDRLQATAQALRQIAGPVIATTLVLLAVFVPVALLPGIVGELYRQFAVTLSTAVALSSLVALTLTPALCALLLRPRPARPAAVWRAFNRLLDGTRDGYGRLVGWMNRRPWLALAATVAAGALVAFSFTSMPKGFLPQEDQGYLFASVQLPEAASLERTEAVMAQARKLLMANPAVEDVIQVSGFNILNGTSASNGGFISVMLKDWHQRPPLDAVMADIQRQLLSLPEATIMTFAPPTLPGLGNASGFDLRILAQAGQSSAELEQVTREILQLANQYPQLSRVFTTWSSNVPQLTLTVHRDRAALLDVPVAQIFSSLQTAFGGTRAGDFSRNNRVYHVVMQNEMQWRERAEQISELYVRSRDGERVRLSNLVTITPTVGAPFIQQYNQFPSVSVSGSAAEGVSSRTAMAAMEQILQAHLPPGYDYAWSGISWQEQQTGNQAVWIVLAAVAMAWLFLVAQYESWTLPASVMLSVLFAIGGALLWLWTAGYANDVYVQIGLVLLIALAAKNAILIVEFARSRREEGLSIVDAAREGATRRFRAVMMTAVSFIIGIMPMMLATGAGAQSRRIIGTTVFSGMLVATMVGILFIPSLYVLFQRMREWAHRRG

SEQ ID NO: 274 - protein, 311 aa, Klebsiella pneumoniae
VRRAAAGAGRLRRPTAVYAVAAAGWRVNRQPRRYLPYCIVDSGVPQKMSAVPSRLRGEQLTLAYGNKTIAESLNVTIPDGHFTAIIGPNGCGKSTLLRTLSRLMTPASGHVWLDGAQIQQYASKEVARRIGLLAQNATTPGDITVQELVARGRYPHQPLFTRWRKEDEEAVNKAMRATGISDLALQSVDTLSGGQRQRAWIAMVLAQETAIMLLDEPTTWLDISHQIDLLELLSELNREKGYTLAAVLHDLNQACRYATHLIALRDGRIVAEGAPKEIVTADLIERIYGLRCTIIEDPVAHTPLVVPLGRR

SEQ ID NO: 275 - protein, 818 aa, Klebsiella pneumoniae
VWNTSPYTGLHINDDAVECGVVGYLADFKLRESSMNPERSERIEIPVLPLRDVVVYPHMVIPLFVGREKSIRCLEAAMDHDKKIMLVAQKEASTDEPGVNDLFTVGTVASILQMLKLPDGTVKVLVEGLQRARISALSDNGEHFSAKAEYLDSPAIDEREQEVLVRTAISQFEGYIKLNKKIPPEVLTSLNSIDDPARLADTIAAHMPLKLADKQSVLEMSDVNERLEYLMAMMESEIDLLQVEKRIRNRVKKQMEKSQREYYLNEQMKAIQKELGEMDDAPDENEALKRKIDAAKMPKEAKEKTEAELQKLKMMSPMSAEATVVRGYIDWMVQVPWNARSKVKKDLRQAQEILDTDHYGLERVKDRILEYLAVQSRVNKIKGPILCLVGPPGVGKTSLGQSIAKATGRKYVRMALGGVRDEAEIRGHRRTYIGSMPGKLIQKMAKVGVKNPLFLLDEIDKMSSDMRGDPASALLEVLDPEQNVAFNDHYLEVDYDLSDVMFVATSNSMNIPAPLLDRMEVIRLSGYTEDEKLNIAKRHLLPKQIERNALKKGELTVDDSAIIGIIRYYTREAGVRSLEREISKLCRKAVKQLLLDKSLKHIEINGENLHDYLGVQRFDYGRADSENRVGQVTGLAWTEVGGDLLTIETACVPGKGKLTYTGSLGEVMQESIQAALTVVRSRADKLGINADFYEKRDIHVHVPEGATPKDGPSAGIAMCTALVSCLTGNPVRADVAMTGEITLRGQVLPIGGLKEKLLAAHRGGIKTVLIPDENKRDLEEIPDNVIADLDIHPVKRIEEVLTLALQNEPFGMQVVTAK

SEQ ID NO: 276 - protein, 310 aa, Klebsiella pneumoniae
MQLQKLVNMFGGDLMRRYGEKVHKLTLHGGFSCPNRDGTLGRGGCTFCNVASFADEAQQHRSIAEQLAHQAQLVNRAKRYLAYFQAYTSTFAEVQVLRSMYRQAVSAANIVGLCVGTRPDCVPQAVLDLLSEYHQQGYEVWLELGLQTAHDKTLHRINRGHDFACYQRTARLARERGLKVCTHLIVGLPGESQGHCLQTLEQVVATGVDGIKLHPLHIVKGSIMAKAWQAGRLDGIELEAYTVTAGEMIRHTPPEVIYHRISASARRPTLLAPLWCENRWTGMVELDRYLNQQGAQGSALGRSWVAPQAE

SEQ ID NO: 277 - protein, 307 aa, Klebsiella pneumoniae
MNKIIENDFSRIDLNLLTVLMVLYREGSVTRTAEVLHLGQPAISGALKRLREMFDDPLFVRSARGMLPTPRAQALMTDLQPLMENLHSAMFGAGEFVPARAQQLFRIGLSDWSEHWLMPPLLPGLMQEAPGVSLQSIAADPFQVRQLLEEERIDVAVSVNKQSRGEVVSEPVMTMGVTTLWSPQQIPCRGPLSVSDFVAWEHVMVAYRETGHGEIDRQLASQGLARRVRFATQNFSTFPLLLTTLPLFATVPQGLAQRWQAQYALRADAPPVAYPEFTLCILRHKRRAQDPALNWLVTKLKQAMRGQ

SEQ ID NO: 278 - protein, 810 aa, Klebsiella pneumoniae
MLIDRDGIRLMGERKGQQATSQARQLRVEAFRRALPVTQKVPQHRLGAVQRIQQPEQRDIGYGKISHPFIAFATHGHQARQTSPELDEQLFKLPRQPAAALDLQQRREKRLVDKPGPLRVPLQANKRTGQVIAVVLVGEAEDQLRLYDGNLPGIIPKLVTDIAPALPEAHRPFGHLLRLQTVAAIRLHQGQRQHDHRLAGRAVQRQRGRQRIGIVRINHRAILEPDLQPVSLQAAQFEHLWFEGRLNHSPGVVKTHPGNHFRSPGCIRSLLLKMLRRHHNAPAPQRTFRFHHRPNLRLRLWHLANQRQIDVHPLDLEVRHRVQLHAEEARVILDIFHHHAGIAQRMGGLQLVAGVGHFGHQAPHPGVQLQLQQTPVLGGADIFALDHLQVVRDARQQEDVRQTRVDTAVGGGVGGIVQRRFLRGVGREEAGVIAIFVVRQRDKAQAGELKLPRFRDHHLGRDLHLVAGAQIVQMDRQIFHRAARLRTANLHAPAVVNKALHHIRCEGERRAGPEIFFVIRALHLLDIVEAAHRHGVRTVRQTTQHARHHQADVAGIVSFAKRLPADIFRTIEVVADILNGSHLFHGLFQEEGRADGADKRHMGGRRDAGDIAQQRHILRAGVELIGRDHRADRLAAGSVILRGIGVPVQAALDKLRRVLKVLAQIVFGDVEDLRFDVLPIVGVVHQLFEAAPQGFDLLKLLMVHHRVQLTAYLEIQLGDMVVDQRFVELFHPLAGLTDAFHKHLHRRGETLRRRRLGERGIVQKVVDIPEARRRGEINFFKQRGVNALARAVFLQRGLPLNRGVFCGNRH

SEQ ID NO: 279 - protein, 559 aa, Klebsiella pneumoniae
MDKPLRLKLKKCYHLARPAHVVNACFIAVLFFSTLLIWREINVLEEAYVANQRNNLANVAHEMDGLLQFNIDRMMFFRHGMQAALEQPLDIDVLRKASQRYLSQRHQQAWRVALPNRRTLPVFGISGSVAGDNPILLVDDPLAADELMATLELGYLLNLTQHDRDFAERMQYISRSGFFTSTLPLRDESQVITHYSQALGAPWFTRQTQRNNPGRGVIWQTFPDDDPQLEEQVVTASIPLDFAGYWRGVLAMDFSVSEIKAFLVSAMQGGQEGEYQLYDSHLNLLASSAPGNVLTLLSPREQELLSRAFVHDNQGGLRLLTRYISWAKLRNFDGVLLRIHTLREGVRGNFGTITIALTLMWVLFTLMLLLSWLVIRRMVRNMSVLQTSLEWQAWHDALTRLLNRGALFEQAMAVASDCQRSGRPLAVIQLDLDHFKHINDRYGHQAGDRVLSMVASTLSSAVRQGDLLGRVGGEEFCIVMPNTTLQEAAAVAERLRQRIQGREVFLHNNVTLRVSASLGVSASEERGEYQFEALQSVADGRLYLAKQNGRNQVCFRSAA

SEQ ID NO: 280 - protein, 311 aa, Klebsiella pneumoniae
MPRAVSLVDPSGLGHIAAEVALQLSTVQTQVGRFAHADVLPRRSFFKGELPGPQMRLGVGVEVKTLRLDLIDGVRRRGFNPVHLLRQQRRGTGVGLRQGDQHHFIHPGNAIFVPVVGVFIEDQLLTRHQLLQFERAATHRVGGEGGPRLFAARGAISHAGRHRVILLLPRRRRDDKQVGDVVRQQRIRFRGGQRHGVVVNFLCAGEGRHARQGVADLTRGVLRRRFIQYLIHVPDDGVGVHLRPIMKLHPRTQGENPAAGILRIDVPLGRQPRHQTAGLFTLRQIPLHQRVVQRDAGKAVALIALIRLAKG

SEQ ID NO: 281 - protein, 429 aa, Klebsiella pneumoniae
MMITLRKLPLAVAVAAGVMSAQALAVDFHGYARSGIGWTGSGGEQQCFKATGAQSKYRLGNECETYAELKLGQELWKEGDKSFYFDTNVAYSVNQEDDWESTSPAFREANIQGKNLIDWLPGSTLWAGKRFYQRHDVHMIDFYYWDISGPGAGLENVDLGFGKLSLAATRNSESGGSYTFSSDDTKKYAAKTANDVFDIRLAGLETNPGGVLELGVDYGRANPQDDYRLEDGASKDGWMWTGEHTQSIWGGFNKFVVQYATDAMTSWNSGHSQGTSIDNNGSMIRVLDHGAMDFNDDWGLMYVAMYQDVDLDSKNGSTWYTVGVRPMYKWTPIMSTQLEIGYDNVKSQRTSENNNQYKITLAQQWQAGNSVWSRPAIRIFATYAKWDENWGYSNTSGLQTKDSSGSGAFTSSRGDDSEVTFGAQMEVWW

SEQ ID NO: 282 - protein, 384 aa, Klebsiella pneumoniae
MGYKRVPEPPARTIPFIFTSLLVIQTKALTGIGAVQHALPPGLIVQVPVHGFLNPALERLLRHPAQIALNFRGINGITQVVSRTVGDKSDQVSKVGDVARLLRHHFVENGADGAHHIDIFTLVMTADIVGLAALAFGRHFVQRTGMVLNIQPVTDLLPVAIYRQRFTRQGVENGQRDQFLREVIRTIVVGAVGHHHRQAVGAVPGANQMVAARFGGRVRAARSVRGFFGEQVIGAVQVAVHLIGGDVVEAEGLLLHVPKSGPVVTGRLQHSKSADHVGLDEGCRTINGTVHMAFCRQVHHDIRAELAELGRHGSSIGDISLGKRVAFAPGHRRQGFEVAGVGQAVHHADFIPGIFNDMTNHGRADKACTAGDKNLHTFSRFSMT

SEQ ID NO: 283 - protein, 474 aa, Klebsiella pneumoniae
MPDISTPNLDYNDMVEAWDINDALMGGTLEMRRQGKKYLPKWPNEDPESYKERLASATLLPAYEEAIKQNIGRVFAEPTVLSEDSPEQIRELSPDIDMEGNRLDVWAQQFFNIGFQYGLVHALVDFPKIDREAVKTKADEKAAGSRPYATMLNPRQVIGWKSKVVKGKVVLTDLRIREVIIVDGDDYGQTKVEQIRHIMPGKVEIYRRNKGDNGESQWQIHDEWETSRDDIPLVTLYTKRTGFMRGSPPLLNLALLNIKHWQSQSEQDNILHVARVPLLVAYGLADGETLTIGSSSATRFDDRQRQGLEYVEHTGAAIEAGKISLEDLENQMRQAGAKLLRAENTSTKSLDQTHEERMQENSPLYTMASSLEDALDNILQIMAEWLGEKEGGNVDVRTELDVSAQTFDAAAATAVQSLRQGGDIRQVDAVRVLQALKFIDPDAKPEEVIDELRNQQVTLAGGLSNPGGANGNGE

SEQ ID NO: 284 - protein, 675 aa, Klebsiella pneumoniae
MNEFTGSAASQADFIWKNAEDLWGDFKHTDFGKIILPFTLLRRLECALEPTREAVREAHDAFKDADVELDTILRSTAEYPFYNTSEYSLGTLGSTKTRRNLEDYIALFSDNARAIFEEFEFGNTVIRLEKAGLLYKICQNFAKIDLHPDVVPDRVMSNIYEHLIRRFGAEVNEGAEDFMTPRDIVHLATALLLDPDDALFEASPGLIRTLYDPTCGTGGFLTDAMNHVGDYGNRDKIPPVLVPHGQELEPETHAVCVAGMLIRRLESDPGRDLSKNIRQGSTLSNDQFAGERFHYCLSNPPFGKKWEKDKTAVEAEHKKGELGRFGPGLPKISDGSMLFLMHLASKLELPINGGGRAAIVLSGSPLFNGGAASGESEIRRWLLEDDLIEAIVALPTDLFFRTNIATYLWILSNKKPQERKGKVQLINATDLWTSIRNEGNKRRIVSDEQRRQILDIYAAGETGALSRMLDYRTFGYRRIRVLRPLRMTLELDKVGMERLEAEAAWEKLSDAHQTFWREALKPLIGQTQPYSWAETFVSNSIKSDEAKQLKVKSNKTLITALINAFGHKDPKAEPVTDSNGELVPDTDLTDYENVPYLEDIDDYFAREVLPHVPDAWLDESFTDARDGQLGRVGYEINFNRFFYQYQPPRKLHDIDEDLKQVEAEIAALLAEVASE

SEQ ID NO: 285 - protein, 632 aa, Klebsiella pneumoniae; identical to SEQ ID NO: 203

SEQ ID NO: 286 - protein, 599 aa, Klebsiella pneumoniae
MTTQAPPSNLLPLNPEQLARLQAATTDFTPTQLAWVSGYFWGVLNQQSGAAVAAPAPAAEVPTITLISASQTGNARRVAEALRDDLLAAKLNVKLVNAGDYKFKQIAAEKLLVVVTSTQGEGEPPEEAVALHKFLFSKKAPKLDGTAFAVFGLGDTSYEFFCQSGKDFDNKLAELGAERLLDRVDADVEYQAAAAEWRARVVEALKARAPVAAPAQLATSGAVNDIHTSPYTKEAPLTATLSVNQKITGRNSEKDVRHIEIDLGDSGLRYQPGDALGVWYQNDPQLVKELVELLWLKGDEPVTVEGKTLPLSEALQWHFELTVNTATIVENYATLTRSESLVPLVGDKAQLQQYAAATPIVDMVRFSPAQLDAEALIGLLRPLTPRLYSIASSQAEVESEVHVTVGVVRYEIEGRARAGGASSFLADRVEEDGEVRVFIEHNDNFRLPANPETPVIMIGPGTGIAPFRAFMQQRAADGAQGKNWLFFGNPHFTEDFLYQVEWQSYVKEGLLTRIDLAWSRDQQQKIYVQDKLREQGAELWRWINDGAHIYVCGDANRMAKDVENTLLEVIAEYGAMDAEAADEFLSELRVERRYQRDVY

SEQ ID NO: 287 - protein, 119 aa, Klebsiella pneumoniae
PPQPNPTVWRSACPTGMSGWKRWPKTIPKFAGTSSISISCAPASCCSRSVLTWWSAPTCSAIFSPISARPVPALSALRRRPISIRSAISRRCSNRFTGRRRIFTVKISPTRSPPFGPGR

SEQ ID NO: 288 - protein, 107 aa, Klebsiella pneumoniae
CCSACWVGINTTARWSLSPSYSPAPVPARLTPCSRCQRRRKGAPCRILSPNVPTTSASRPICLGCSPKSTRRWPPPASFRSAGSAAAPTGWIPGRWPTAGRITPSCI

SEQ ID NO: 289 - protein, 114 aa, Klebsiella pneumoniae
PVPGSGWRRAEVRERHFRDFRPWQRPGAGAGAGAGQRRYARLSGAQRAGDGPRGHRFCPPGPAPADYRLHLLHRSGSGQHDHRRRHRQRQPHPTAAAAGRCLRHPPAGSGAPAD

SEQ ID NO: 290 - protein, 126 aa, Klebsiella pneumoniae
KMTRWSSASAFTASRASTAAASARWTKPSMRCSIPCWKTALTAARCASGIPSRARGRKYSRAKPRCKTATGLSRWLITSAPLRFPNCMACITALPSAAKRPASSSNATSSAATVLRWIWRASPSLC

SEQ ID NO: 291 - protein, 186 aa, Klebsiella pneumoniae
KAGRGAGDHLAGADRKYRPDRHLSDAGQGGCATAGGERLRAADLRLRAVYRRDPQQQPGAGGVVSGVRSRGIGVGQRQPVAVPRHGADEPQAVGVGLAGAADDYYPGGAGAGDGAVCGVRHLSDDGQKLRCRGAGSRALRVWPGGNADGDRQYAGDYRPFRAIAYGLPGSADGGGVLYRYRQRAGD

SEQ ID NO: 292 - protein, 25 aa, Klebsiella pneumoniae
RQRAAGAGGGGGARLQPPAGAGYRP

SEQ ID NO: 293 - protein, 121 aa, Klebsiella pneumoniae
GLPTFASTLNSRFIRSTMMSRCSSPIPAIMVWLDSSSVHTRKDGSSLARRPRARPIFSWSALVFGSTAMEITGSGNSIRSRMIGASGSHRVSPVVTSFRPIAAAMSPARTSLISSRLLACI

SEQ ID NO: 294 - protein, 216 aa, Klebsiella pneumoniae
TAAAGGPVSAGRAAGRRCGSHPFCSAPPPAGPVRDRRRTAAKNARLAGALRIALLTAPGVDARRAGPALATAGVERGAGGRAVADPPPAVGRHGGGKRLADGAAAERGGRARHRQLFAAARGAGRLAGAACADIADPCRTPSGSAETQSAAGGVRRPAAVCAGELASGAVCRAGSGVTGRGKQRAGPSRSGASGRGGATGQPGLLSPLVSDGEKGD

SEQ ID NO: 295 - protein, 56 aa, Klebsiella pneumoniae
RRRGLPASPCSGRDDPYAGAVRLYNRHRQPAAGSTLSPPRLPNMPHSTSCSARPTS

SEQ ID NO: 296 - protein, 71 aa, Klebsiella pneumoniae
KHPAEDGRRPGGAQRRQADAVAARQSGKGPASAVVRLPGSHPDAVEQRAQQRQAAAGSGRRAAGGGQYPGE

SEQ ID NO: 297 - protein, 98 aa, Klebsiella pneumoniae
SRPDAAAGSAGDCAALRRGGGGGRADRLCRAGGAARGAPSGDGRYPPGAAPGCAGGSAGAGAGGYRRPDAGRAAGAGDRGDDRPGGCAVVYLYRREVF

SEQ ID NO: 298 - protein, 41 aa, Klebsiella pneumoniae
PSGFRVALLKLNRTSDFRVKCLVATSGAGAGAGATTGAASS

SEQ ID NO: 299 - protein, 148 aa, Klebsiella pneumoniae
AAYPAGGAARRAGGDSGRGPALYPRVDSFSAGRGGYPHQAGGRPPSAVDVRRGGAGLPENLTGYHHPAGSGGGRFSRALRQPAAKHSGVAPGAGDDLRRPRPPDAALQQSAGEQPALYRQRRQPAHYRPPQRSHAGDCLRRQRPRRQR

SEQ ID NO: 300 - protein, 102 aa, Klebsiella pneumoniae
SAVASCPPYDFLQHHRPAAGAGGYGGDRPPGQPGIPRRRSGRGDGHQFPLHAAAVPAHEHHRAHRSGLGRQRSAAPGAGAGAAAGTGAGRRGADYPASPAAN

SEQ ID NO: 301 - protein, 53 aa, Klebsiella pneumoniae
TVLHHQSHRQRQRPGAVDGVWLCAPVWRPGGAGERAGAGDDGAAAAAASVDRG

SEQ ID NO: 302 - protein, 115 aa, Klebsiella pneumoniae
WPARHRSAQCAARSRCGAHPPGEPPPGAGGGAGYPFRPECADGRDARCSGTGRPYADLYRPQAGAADRQGAGCRRATPPSCAGARTLARRTKHSSDAVLRRPPRRLAAAAAGHLP

SEQ ID NO: 303 - protein, 31 aa, Klebsiella pneumoniae
CRALRGSVRTVRNNAIRSWKSWPARWRSRWC

SEQ ID NO: 304 - protein, 89 aa, Klebsiella pneumoniae
AVYPFRAGVYGGSEPPAGGHPRWTVPRRRPPLAVRLYPGIPGASGPVPAPVGSGHQPADQPGFAAAGAGPGGQSERALHPISRPASGVV

SEQ ID NO: 305 - protein, 70 aa, Klebsiella pneumoniae
ASGDPAGGAAGGSEGQRGAGAGGGAGERPGALAISRRDLAARQRKSQSGNSAGDSPRAPCPRAVWRHRAA

SEQ ID NO: 306 - protein, 48 aa, Klebsiella pneumoniae
FAKTTARSAWRWPMRWKAALASTWNSAARRGGCSCGRVSAIRSIPWNG

SEQ ID NO: 307 - protein, 56 aa, Klebsiella pneumoniae
TAPAPAAGKFTSKTASLPGKPSRPIIRAPGRICQITNRAAARAAPATPGISTAPTA

SEQ ID NO: 308 - protein, 107 aa, Klebsiella pneumoniae
GEGDVDINCIFGRNVNPAEPLYAAGDPAAVRQRPGPPGAAGDHAGRNGADVRRCLLAGDGRQRLGGESDPCRPRSGAGVLRPGRAESAFATRRATADLTPGSVGESA

SEQ ID NO: 309 - protein, 47 aa, Klebsiella pneumoniae
SADARSGTLPPRRRTSGLSGRRYGAAGLHSAAGWRLAGGPAAAGAAL

SEQ ID NO: 310 - protein, 61 aa, Klebsiella pneumoniae
SERRDIFIAAGGGGCRVRHCDASRTGGPGRDCQRHAGGGASGVDAEGVERLRHLSFPRLPT

SEQ ID NO: 311 - protein, 83 aa, Klebsiella pneumoniae
APVSTPAPAKPSGRSASRRSPAFTARSCSRRQTAAATPSAALSRIRSTSTLIATTSPLFPACAWCINRLSRKICPTLPPTAAY

SEQ ID NO: 312 - protein, 151 aa, Klebsiella pneumoniae
SADCSAAPGQPAGLAADWPAAVPEGGAGFQLDHFYLLHLADGDQHRGGCAADPAGLSQRRPRPPALGVDGDAQNPLSGGAAGGAYRRAPLHRHRLAGDRGGGNAHRRTGDRLLDLERVEQPQCGKHHHRHRHYRRRRPAAGAGPDAARSPL

SEQ ID NO: 313 - protein, 89 aa, Klebsiella pneumoniae
PPPSSARSCKIPPAATARKSSLKPCSSTGSWRWPPGCSAQSIRRKWPRMSPTLSIVSTSWSPHSTTPPSSVSNGWSGSIASSPLVWRCC

SEQ ID NO: 314 - protein, 45 aa, Klebsiella pneumoniae
VFSISSTCSPGRRPWLSSLSGPPSILASAPRRPGCFTRSTPLSPC

SEQ ID NO: 315 - protein, 38 aa, Klebsiella pneumoniae
LPRARPVSHWIRCVISPTTALARWASRLPPPQRSGARM

SEQ ID NO: 316 - protein, 32 aa, Klebsiella pneumoniae
IAVCPAGNAPVGQQPSHSHFRGDNGRGAGAGA

SEQ ID NO: 317 - protein, 103 aa, Klebsiella pneumoniae
QRGGGCRRGVAARRFRRYHHPDQQRRAGAVAAAGAGGGAGGLENDDRHQRHRSGDSHSRPAADADPPWRRGEYYQYRLDRRAVALSRQPCVWRQQGVCEAVQL

SEQ ID NO: 318 - protein, 51 aa, Klebsiella pneumoniae
CALPVAGARHTQVHAALWQSGRYRLCRRLGHHPPVEFPAHLFRYYPALKRP

SEQ ID NO: 319 - protein, 105 aa, Klebsiella pneumoniae
RSGLNGHDGRRAGDDGLCRTVYRPGGDGANHPSEHARRHRRIDRHLYAGHRRGGQLAGGRGRPANHRIANQRYGDCRLSAFLRADGRMDSRLRGGDGHYRLCRGL

SEQ ID NO: 320 - protein, 82 aa, Klebsiella pneumoniae
AVQPGTRRRRAAGVAGMGRQFSYGSLVREREKDPAGERELAGRPFGLRVAQHPELGGYGLWLRQPGGGGNPPDATAGRVDQR

SEQ ID NO: 321 - protein, 36 aa, Klebsiella pneumoniae
AITLGKNGYAGPVVQHRDLLSPAGAKPCLGRCIQGD

SEQ ID NO: 322 - protein, 56 aa, Klebsiella pneumoniae
IPSPGRGRRGNKGRGCRTALLNRPKIWWAGKTSRSSTSRQPARRGLWMTRSAHCSS

SEQ ID NO: 323 - protein, 135 aa, Klebsiella pneumoniae
LPSKAPSRAAVWAKSPAPKWPPRWSWRRKITATVSRPRRCCASKPAAYVCKRPTSVWPPSPIFMPRLSTCAATPRWSALLPVPSAASAVCPSPRRCAATLSSPVKPVSASMARRLSSRKPALKSTTPATVRLSGA

SEQ ID NO: 324 - protein, 91 aa, Klebsiella pneumoniae
RCRVRAHRCWLRMTARESPPRSASGCLSPLSALTPAGTGRQEAAASAWRLSTVSPRRWAARCAARPALSAAPASALAGRSIISCLISPLPE

SEQ ID NO: 325 - protein, 46 aa, Klebsiella pneumoniae
RSSAAGPGGRRGDSGRCAADHGLWPGAGGAQGAGADRPDIRPDGCH

SEQ ID NO: 326 - protein, 45 aa, Klebsiella pneumoniae
IVKYQPGRSGRFRLAQPAAHGAGPARRHSGAGDCAGADCRPERGG

SEQ ID NO: 327 - protein, 64 aa, Klebsiella pneumoniae
RHYVAVARRPGHRPAVRRRYGGRQRHDQRPACGGDCHRRHLPGRQYGRSLRRQNGRRAGAGGGR

SEQ ID NO: 328 - protein, 89 aa, Klebsiella pneumoniae
ARRGAGGHPAPARGAGRTAARAAADAGDGGPLRLRYLSPGAHCPGGGAVALLRLPGGGEVAERRRHVSGAHGHLPRHLYRTRSARRFIE

SEQ ID NO: 329 - protein, 61 aa, Klebsiella pneumoniae
LTAARRRSNFPSWAPPAATACSTAWPRASTRNGRLSRSTAASRWRWRSAATKAPCRRLPGH

SEQ ID NO: 330 - protein, 96 aa, Klebsiella pneumoniae
AFSGSPDAYYRDQYCSLAGAGPGADRYRQPAVDPACARTGSAVNHRHRFYRQPPGGAAGVPACGALQRNIVLASAAAAAPEGDWHHDGAGDQRESE

SEQ ID NO: 331 - protein, 152 aa, Klebsiella pneumoniae
PRERRWKLSPPAAASRRSPPRARAVNTERVPDAGVTSRPHRRPVPAVYYASGGHHSADGGYPAGRDHRLPLSAGLRPAGGRLPDHSGSHPLSGRQPGRGDLRHHRPAGAPVRPDVRPQADVVAKLWRRLGSHAAVPADPAAGRRRAGSAGGH

SEQ ID NO: 332 - protein, 118 aa, Klebsiella pneumoniae
RRHFESHFGVPPPNGAKHFVVWHDSTRRESIQGGKCETSNAIRCRRVCRCLLSDRFPRGEPGQPRLCENAGKGGSGDGAAELHSQPRGTTTGGQTVVADWRCYLQSGPARAVANCRGD

SEQ ID NO: 333 - protein, 67 aa, Klebsiella pneumoniae
RTQKPSRVLSGRLTEKSGQHRQTALTTPGSVTMNCGVRKSARLSHPEKVRVTGPVNMQTVTVQWLIS

SEQ ID NO: 334 - protein, 142 aa, Klebsiella pneumoniae
SVPLSRPDPAPVASRPPADRCGHDGSIRAESATDSSRPMPPDLILSPRLAERYAPHPPPGTTAHIASAPRRSYAGGQCSSQVSDQSLTWMPAPPASGFSAPARSARPTMLQPYRSAEPADNSGCGSVSVDCTIQTPADGAHK

SEQ ID NO: 335 - protein, 191 aa, Klebsiella pneumoniae
PAGEHRLHRFTLQQTGELGANVGFHQGVQRMARTLRVGAGAGAGAGGGRNTTVIGDLHNFVMQGVAQLADATSQRRGLLRQRQGGQRERRLYAAAAVVAAEHHPLHLKVVEGILQDAHDVVVGRVEHVGDIAVDKELAGLAAGEHLGGHAAVGAADPQRVGPLPVDPFFEIVRIMLTLLQRPAAVAGQQRF

SEQ ID NO: 336 - protein, 44 aa, Klebsiella pneumoniae
ARYPAPAGGSSARPPASRSAPAPTARQTRSAAASPPSTLPAPAG

SEQ ID NO: 337 - protein, 266 aa, Klebsiella pneumoniae
RCPAHRPSAGSPASPWAIAHPCVPVATFRSHPAETPSSQHHPQPPRHSAIAKAAPCGRDPQPAGKGHARPPAATAVATGRSSVYRSSSASSSSRRRSVCASRPSENERGFIPQRASQEKSAGTVDQDRVSSISPPLPCGRQAISFAPESGMAMGENDCVSMRAPGFSSPGMRSAMIRRHCVCNAASRVTAACGGRRSRQSATPPPDSPIASRIGSPVQVPRRLIRISARSRQGKTELPTPLGVALGPAGFCRRESRDASQRSLHAG

SEQ ID NO: 338 - protein, 172 aa, Klebsiella pneumoniae
KSKSLRRKQLFRVRQGVARDFAAAQQTGQLLQASTFIQRLHMGFGHLAIGLFADKEMMVAAACDLRQVGHAHHLRGLAQLAQQLADHGGGRAADADVHFVEDERRGFHFTRGDHLNRQRNARQFAAGGHFGDWLQRLTGVSGDAELNMVGVGGEMAFIERDLNREDPVRHRK

SEQ ID NO: 339 - protein, 110 aa, Klebsiella pneumoniae
PPANRVLISVGEPGCASPTWPSSASSCVTFTLSPSPRNRPTEEIPCFFAHASSVLLAVPASAPVMMSICSAGVTRRPFFFCTGRLSCFISSSTTQPPPWTIISGRWCASR

SEQ ID NO: 340 - protein, 467 aa, Klebsiella pneumoniae
RQHLRGLGRIGHQDRIHFPATANGAAQRAAVGARDRRFARRIDVQHQQGIHLGQHVGKIIIQIAGTGITVRLEYHHQVFIRPAGARCFNGGVHFRRVVTVIIDQHRAARFAVDFGQRKLAKKIKAASSSLEALQCAQNSPIVNPLFRRHGDGRRRVQRVMASRGIERHLQDRFILAHQAEMPLRPNLTIVLDAYVGVVAKTVGGDLPANARQQFPDHRIVHAHHRASVERQVVQEVDKGLLQILEVAMVGIHVIGFDVSDNGHHRLQMQKRRVALIRFRDQVTAMAKAGMYARRFYQPAVDKGRVQPGLGVNAGYHRGGGGFAVGPGNGDPVAKAHKFRQHFGTTDHRDTRLMRGNDFRVICRNRAGNDNHAGITHVFRAMVEINGGAKLRQLLGHRIRRQVGAADLVTFVSQHFGNTAHTGTADADKVNVPNATHLGHYGTQFCQILCIHSLRHQLLYSGGENHRN

SEQ ID NO: 341 - protein, 249 aa, Klebsiella pneumoniae
SRLQRCQKKREPSCSRFYFAVLPAALARGGQQTIRAEHRLDTADRLARTVPVLDQGEADVGITIVAKANPRRDANLRFIKQLFRKLQRPHGGVRFRYFRPHVHRRFRTLHHPAGLMKPFDQHIATALILFGNIAHALLIALQRSYRRHLQRSKSPVVMIAFDTSEGIHQSLITHHKANAPAGHVIAFRQGKELDGDIPRAGHLHDGGRFPAVIHDIGIGQIVDDQNVILLRQSDNLFKEIQFDALRGRI

SEQ ID NO: 342 - protein, 82 aa, Klebsiella pneumoniae
RYAQSASPLSQSRASQTARHTAGADTGRPSGSDRRAGSRAFRLPRRPDGSAEYGGSPGAPAHRPPPPPPDRFYPYPPDPRRK

SEQ ID NO: 343 - protein, 264 aa, Klebsiella pneumoniae
ECCDDQLAQELPFTRWISISRGLSSRRALLTGGRDSMLDSATSATQVPSANRNSPHTRAVVRRLRPDGALATVGAGGGAAASGRGTETSDGAPAAGGAGTAVDGEGVSASIDGASSSPSSVHQITGTVSLYPRLGTVAMYSRLTSSPSLSDLRSSEILCVTTWLVTTFRVQTFSISSSRLSTSPGWRAKKTRRSIKRGSRVSWRPFLLIWFTEGVTSHSPTRTTGCSIQESPRQKGKGAMITHLSYLFLPGVTPSGIRPELALY

SEQ ID NO: 344 - protein, 254 aa, Klebsiella pneumoniae
QIKLRQTDHHHDAVGSHLLLVFQQRGQLIVKKQAVIQSGFRILRRVGANKRIHPAALIAGELQLRQQHIQRATGAGRPFIDRPAHLRPALAAQDTRGTQLQQLLAGQLAADPADGEENNHHHEANGDRQRGSDRQRTEIVHHRVNVDQMQRNARMFKRRNRDLTELLMAAERAIAIGSGMAVERFAVEHEIDMHDLDRRHQLIQLRFKLIERGGDEPVIQHGRHRLNAVFDLVLNAVIKTQRSANQRDKDGQAS

SEQ ID NO: 345 - protein, 286 aa, Klebsiella pneumoniae
DFGSVGFQAGGFQRVAHSAHLFPGGVDVDGAVVIGHHVFCACFQRRFHDSVFIAFLEGDNAFLAEQVGDGTVGAEVTPGFGEGVTHFRNGTVTVVGQTFHHHRGAARTVAFINDGFHVRVFIAADAARDGAVQGVASHVVRQRFINGRTQTRVGSRIAAAQTRGGDQLANDFRKDFTAFGILCRFAVFGVGPFTMTCHKKLSKKRALSGGVNYKFFNRLPVAPRLGQRSGFRRADPAIGQMFGESNLPLMRQRKTEPEFRIALYTRRIAMTQMRKYLELHRALTVD

SEQ ID NO: 346 - protein, 51 aa, Klebsiella pneumoniae
SLAAGAVRVRPAAAAFRRRAGDRADGRRPSPAPAPAAGARVRPSRGSAPAY

SEQ ID NO: 347 - protein, 100 aa, Klebsiella pneumoniae
FIALAQSLNTGLALRVMPMDHHQRLALLPHHLTILAKPLAVGIKHRQPVAKARRDVTVDKLLPLFSGDVFPRRAAQTEVKRGLHHGLIRRADAGLRRAGR

SEQ ID NO: 348 - protein, 68 aa, Klebsiella pneumoniae
ASEFGQPPAIALADTARCSLRSPPPGRSAVGELAKAGLATRKYAWIPSRACGRQPSAADRAGARPGAK

SEQ ID NO: 349 - protein, 107 aa, Klebsiella pneumoniae
MSNDRVRRSAASLTFCSSSLSDRQTGCRWPRRRSFAHLPLPPPWSHTDRLRCTWNVRDRDSTGTTSPSCCHLPGYWSGRDRCGAPSARADWSRQTPVSSVRTPREKA

SEQ ID NO: 350 - protein, 72 aa, Klebsiella pneumoniae
SPSAGSPQTDCKTAAGVPDARSPEWCSGLHRGIRRTVRLPGSCAGECNGIPRGSPPLSARRSVCCDPRYHAA

SEQ ID NO: 351 - protein, 26 aa, Klebsiella pneumoniae
SDRGRQTPGSPAHGGAGPSAGHTLPG

SEQ ID NO: 352 - protein, 44 aa, Klebsiella pneumoniae
RHSHSTGPWRKRRSQSDETRRLTAQMGGTKASSCRRSKRINSPR

SEQ ID NO: 353 - protein, 105 aa, Klebsiella pneumoniae
FFRQLYFNGVGVPLFQLLGNRPLNVFVEKRVLAPAALQGAKMGFIPGRIAQRDGDITQPAQVANATNRRPFGHLQKPRFAPGEQLHQRRGMQRFAWAEILFIGEL

SEQ ID NO: 354 - protein, 187 aa, Klebsiella pneumoniae
ANPDRNRGGHCAEDDQGTEEAAGGVTGPHHHVGAVGGIALVDGELTRQNDDVAHRQAEDQAGDQRRGEVRHREDKARAEQQRRHAKTDTGLYRAADIEDPYQRPFDDAGEQEAGAKRRHRAVNAGINPRLQHRHEGHFVKGADAVQVVHVGPGEDAGGEQANKDRERPVGIPKTFILFHYPAPVTCR

SEQ ID NO: 355 - protein, 120 aa, Klebsiella pneumoniae
MTSKTARRRRRAAKSSSKKRAPGGPFCVWLNGRLPPDYSPGDSTVHSAGKTIHDVLHPYCRQWPEDQLAGPGRAFWRNSAPKNQNSSLNTYRYGSCAYSFSGGCSDQSYAFYSLQYLRLP

SEQ ID NO: 356 - protein, 49 aa, Klebsiella pneumoniae
TLTVTRPASPGRQGSRRKGMFVSQPVPEAEGPPAASAGETGSITARTAD

SEQ ID NO: 357 - protein, 77 aa, Klebsiella pneumoniae
WCRLSRRRPGLQRQCTLSVLCVPPSAAVSPAQRGVCAALSRTLCCRAARFLPPCRPDYRFSCCPSPCSVLPRYPFEV

SEQ ID NO: 358 - protein, 113 aa, Klebsiella pneumoniae
NDTSDNRLSVGVLRINKSPFYPLRTAKIGRQQRSAQQRKQQLTQGKHIRDRREGKSLYRQQQGDEQPDNIVFRHHRAPLEKGDSQPERVIPHGEGKQQRGDPQRHMARAHGAQ

SEQ ID NO: 359 - protein, 132 aa, Klebsiella pneumoniae
KHTAKAGFVAGIALPQGLREPLILAVHRRLLLARQRRMRLAAGRLLTDPRMGAERRVQLILSPVSHRLPGGLQQRMAAGERSQAHQRLAPGRERHAGGQQPRRLIFTQAVKLTQRDHPDSLSFSSPPAPAAE

SEQ ID NO: 360 - protein, 77 aa, Klebsiella pneumoniae
SLQSCAILSVVCGVIRARCAFCVGGETVSLQPARSSTSMTETTPFTTFSSTALLASCYPKDSVLQVFCEYHETATSL

SEQ ID NO: 361 - protein, 166 aa, Klebsiella pneumoniae
TSIRRASSSIEALARIRASSWSIMSLLSRRSLRTPSSYRPLFLLPPVTPRVETSASPGPFTTQPMIETSIGVMISSRRCSRAFTVPITSNSWREQVGQAIKLMPRERIRRDLRISKPTLISSTGSAASETRSVSPIPSDSSSPRPIADFTAPLRAPPASVIPRCSG

SEQ ID NO: 362 - protein, 104 aa, Klebsiella pneumoniae
PARAGCAPPRRFPPVPPGPPLREPPGRRPVFGYSPAAVQSAFAGYGYCCRGSRQSPAAQGSGAPRPGRPTARYLHAYWPTGFSAHATDGEEIDAAATPATPGAR

SEQ ID NO: 363 - protein, 26 aa, Klebsiella pneumoniae
TAPGMPPARRGSWRALPANRWSSAPG

SEQ ID NO: 364 - protein, 141 aa, Klebsiella pneumoniae
LRIDVKQQAGEEGGHRPAQRAPHPRPAEFKLALTRHPLGVRFQHADAAVKGQTDIDPAKDAAQQDVDFQQVAEQQIRRTREDQQRGDIPEQMFAQPQLVLDKSIANLRKQRGNRQYGIDNTGIASLQPNLLVKPDREQGAG

SEQ ID NO: 365 - protein, 75 aa, Klebsiella pneumoniae
CRGAPASRSGCRRNGRHGPAAAAQSHRRPCGKPGCGRKEPGNRRAECGRGRWREFHGQSLSRYSLPARQRRTCAR

SEQ ID NO: 366 - protein, 68 aa, Klebsiella pneumoniae
VARRSCAVFRKSALSISTFAPRLPGSRARQRTLCGIPNRSRAAPLSGSSGIASAMVWPIKRQGTLNLS

SEQ ID NO: 367 - protein, 48 aa, Klebsiella pneumoniae
PNAPRCHQVNSHLPPASRRHLSAAPGFRNAPPGRCHGRRRRCGRAKRR

SEQ ID NO: 368 - protein, 159 aa, Klebsiella pneumoniae
PPDGFQRWPADADPAGFDRMKNRGDEQALPGRYRPGASKPAEFCRCRYSRQSARSAAAPVRRWPGSPPGVALYSRRRSGGNPRQLLSATAGRYASAGRRGRSTGNRVGNGRTLPATPEYGWRAGHPGPVYGRAPAPLPAPDACSRCRPRRVLHHSSAAG

SEQ ID NO: 369 - protein, 101 aa, Klebsiella pneumoniae
CSCGFFPVTAVISAASRHMMMPSLSVDHGVPSKRRKEAPALSSPPKPKLPSNRPSTNHLKPTGTSTSLRPRSFTTRSIIAEETSVLPTATSLPHCGRCWNR

SEQ ID NO: 370 - protein, 85 aa, Klebsiella pneumoniae
HTTASRIPATLPIGVLRLSTPPPTFASATTVSTGRPTAVIRKPIAAVQTCSPACKPTIGGKIMLPAPTNNAKVIKPNAMMSRDFN

SEQ ID NO: 371 - protein, 167 aa, Klebsiella pneumoniae
SGFPARADAFYYASASGADHTAAAPNCRGQAEESCSGPPTATTTGASNSRNARSANRSLPPVKTTADAPQTPPESGPEYTLKRAPAPAFSMTAVPARVTLLSKFRNGRRNDTPCREPFAPYDHGHCVPALCAGGEYGRPPCGLPHKRWSPRRGSAAVRGCTPAPDGS

SEQ ID NO: 372 - protein, 105 aa, Klebsiella pneumoniae
KHDSNNKRNFGGTFPCFEGFVKVAKVHHQMANTDNDVIGQRGENAPHDELHKEAIHDGGRRQKTFWGGKAGAQQPKQNSDRHEGDDTGNAMENGRYRRDWEPYRL

SEQ ID NO: 373 - protein, 162 aa, Klebsiella pneumoniae
SVAISPGVRWAAVRIAAQATGLRLCGIVDEPPRPSATGSPTSATSVCISREKSLANFPSVPQTPANQAPASSSRSRWLCHGVSGSDRPRICASARPTAGPFSFSASRVPAAPPNCSASSRGRISRSRCCQRRSASRVPASFRPKVTGSACCIQVRPGITVSR

SEQ ID NO: 374 - protein, 116 aa, Klebsiella pneumoniae
PPPAPAPPPPTASLPAADTARRRPPAPRCRGWHFHTVWRYGTAAASRPGALHTECRWCRAAPSGSRGCTPPGAPYGLCSPYSGGCRSCAASATSTSTGTRCRQDRSPAAHGAETSI

SEQ ID NO: 375 - DNA, 1125 bp, Klebsiella pneumoniae
ggccagctcggctgccgcgtcctgctgctggataacggcaaaaagccggggcgaaaaattctgatgtccggcggcggccgctgcaactttaccaacatgtatgttgaaccgacggcctatttgagccaaaacccgcatttttgcaaatctgccctggcgcgctacacccagtgggactttatcgagctggtcggcaaatatggcatcgcctggcatgagaagaccctcggccagctgttttgcgatgattcggcggagcagatcgtcaatctgctgctcgcggaatgtgaaaagggcggcgtgcagatccgtctgcgcagcgaaatcctcagcgtggagcgcgatgaacaaggctaccggctacaggtgaacggcgaaacgctgatgaccaaaaagctggtgatcgcctccggcggtctgtcgatgccggggctcggcgcctcgccgtttggctataaagtcgccgagcagttcggcctgaaggtgctgccgacccgcgcggggctggtgccgtttaccctccacaagccattgcttgagcagctgcaggtcctctccggcgtgtcggtgccgtcgaccattaccgccgagaacggcactctgtttcgcgaaaatctgctgttcacccaccgcggcctttccggaccggcggtgctgcaaatttccagctactggcagcccggcgagttcgtcaccgttaatctgctaccggactgcgatcttgatgacttccttaacgagcagcgcagcgcgcatcccaaccagagcctgaagaacaccctggcgatgcagctgccgaagcggctggtggagtgtctgcagcagctggggcagatacctgatgtgacgctcaagcaactgaacgttcgcgatcagcagacgctggtggagacgttaaccgcctggcgcgtgcagccgaacggcaccgaaggctaccggacggcggaggtgaccctcggcggcgtggacaccaacgaactctcgtcgcgtactatggaggcgcgtaaggcgccgggtctctactttatcggcgaagtgatggacgttaccggctggctcggggggtataacttccagtgggcgtggtcaagcgcctgggcctgcgcgcaggcgctggtggaaggg

SEQ ID NO: 376 - protein, 375 aa, Klebsiella pneumoniae
GQLGCRVLLLDNGKKPGRKILMSGGGRCNFTNMYVEPTAYLSQNPHFCKSALARYTQWDFIELVGKYGIAWHEKTLGQLFCDDSAEQIVNLLLAECEKGGVQIRLRSEILSVERDEQGYRLQVNGETLMTKKLVIASGGLSMPGLGASPFGYKVAEQFGLKVLPTRAGLVPFTLHKPLLEQLQVLSGVSVPSTITAENGTLFRENLLFTHRGLSGPAVLQISSYWQPGEFVTVNLLPDCDLDDFLNEQRSAHPNQSLKNTLAMQLPKRLVECLQQLGQIPDVTLKQLNVRDQQTLVETLTAWRVQPNGTEGYRTAEVTLGGVDTNELSSRTMEARKAPGLYFIGEVMDVTGWLGGYNFQWAWSSAWACAQALVEG

SEQ ID NO: 377 - DNA, 18 bp, Artificial Sequence
  Primer 210-5901
gtgctggcggttatcctg

SEQ ID NO: 378 - DNA, 20 bp, Artificial Sequence
  Primer 210-5902
gttattcccgggtcgaaatc

SEQ ID NO: 379 - DNA, 20 bp, Artificial Sequence
  Primer 210-5903
acgcagaagaaaccgaacag

SEQ ID NO: 380 - DNA, 20 bp, Artificial Sequence
  Primer 210-5904
cgacggaataaagtgggaat

SEQ ID NO: 381 - DNA, 24 bp, Artificial Sequence
  Primer 210-6097
gaccagagtgaaatatttacaaaa

SEQ ID NO: 382 - DNA, 18 bp, Artificial Sequence
  Primer 210-6563
gtttatcgccacgctgat

SEQ ID NO: 383 - DNA, 20 bp, Artificial Sequence
  Primer 210-5905
gcctgatggctgaatcgtta

SEQ ID NO: 384 - DNA, 19 bp, Artificial Sequence
  Primer 210-5906
gagcagcgttttgttgtcg

SEQ ID NO: 385 - DNA, 25 bp, Artificial Sequence
  Primer 210-6345
caagctgaagctgttgggtgtggac

SEQ ID NO: 386 - DNA, 22 bp, Artificial Sequence
  Primer 210-6346
ggcggtgcggatgtagaacatc

SEQ ID NO: 387 - DNA, 20 bp, Artificial Sequence
  Primer 210-5909
ggctggaacctgtacgtttg

SEQ ID NO: 388 - DNA, 20 bp, Artificial Sequence
  Primer 210-5910
tcgtcgatgctgcagatatt

SEQ ID NO: 389 - DNA, 19 bp, Artificial Sequence
  Primer 210-5911
ccgcttcgtcactgttgag

SEQ ID NO: 390 - DNA, 20 bp, Artificial Sequence
  Primer 210-5912
tgactgacaaaggcggagag

SEQ ID NO: 391 - DNA, 20 bp, Artificial Sequence
  Primer 210-5913
cgctgaacgtcgataatgtc

SEQ ID NO: 392 - DNA, 20 bp, Artificial Sequence
  Primer 210-5914
gaaccacctcgagtttcacc

SEQ ID NO: 393 - DNA, 18 bp, Artificial Sequence
  Primer 210-5915
cgcgcgatctctatcgtc

SEQ ID NO: 394 - DNA, 20 bp, Artificial Sequence
  Primer 210-5916
gagaccggagatcgcttttt

SEQ ID NO: 395 - DNA, 20 bp, Artificial Sequence
  Primer 210-5917
gccgcgtttgatatcgtcta

SEQ ID NO: 396 - DNA, 20 bp, Artificial Sequence
  Primer 210-5918
cgttttaactcgtcgccatc

SEQ ID NO: 397 - DNA, 20 bp, Artificial Sequence
  Primer 210-5919
gtggatagcggggtactgaa

SEQ ID NO: 398 - DNA, 20 bp, Artificial Sequence
  Primer 210-2920
gcccctctctatcccatagc

SEQ ID NO: 399 - DNA, 19 bp, Artificial Sequence
  Primer 210-5921
taaaggcgctgggcattag

SEQ ID NO: 400 - DNA, 20 bp, Artificial Sequence
  Primer 210-5922
ggctgactgccggtattact

SEQ ID NO: 401 - DNA, 19 bp, Artificial Sequence
  Primer 210-5923
aaccaacgccttgttcctt

SEQ ID NO: 402 - DNA, 20 bp, Artificial Sequence
  Primer 210-5924
gtgaccggataacgccagac

SEQ ID NO: 403 - DNA, 20 bp, Artificial Sequence
  Primer 210-5925
gtaaggacatgcaggagatg

SEQ ID NO: 404 - DNA, 19 bp, Artificial Sequence
  Primer 210-5926
gtaatatggcgacggtctt

SEQ ID NO: 405 - DNA, 20 bp, Artificial Sequence
  Primer 210-5927
cattaggctagtcgttctcg

SEQ ID NO: 406 - DNA, 20 bp, Artificial Sequence
  Primer 210-5928
tacgttcctgttaccgtgtc

SEQ ID NO: 407 - DNA, 21 bp, Artificial Sequence
  Primer 210-6564
gacgtcagtttactggtaggc

SEQ ID NO: 408 - DNA, 20 bp, Artificial Sequence
  Primer 210-6565
tctttcagctgacgaatgac

SEQ ID NO: 409 - DNA, 22 bp, Artificial Sequence
  Primer 210-6566
ctcgtaataacgctctataccc

SEQ ID NO: 410 - DNA, 18 bp, Artificial Sequence
  Primer 210-6567
caatagccggaatggata

SEQ ID NO: 411 - DNA, 21 bp, Artificial Sequence
  Primer 210-6568
ctgatgatcctgattaacgac

SEQ ID NO: 412 - DNA, 19 bp, Artificial Sequence
  Primer 210-6569
cgattttacgctccatcat

SEQ ID NO: 413 - protein, 356 aa, Klebsiella pneumoniae MGH78578; identical to SEQ ID NO: 216

SEQ ID NO: 414 - protein, 356 aa, Klebsiella pneumoniae A5054
MKMKLTALMSGIILSSSALCFSATAADKMVIAHRGASGYLPEHTLPAKAMAYAQGADYLEQDLVMTKDDRLVVLHDHYLDRVTDVAQRFPQRARKDGRFYAIDFTLDEIKSLKFTEGFEPKNGKNVQTYPGRFPMGKSDFRIHTFEEEIEFVQGLNHSTGKNIGIYPEIKAPWFHHQEGKDIAASTLKVLKEYGYTSKQDKVYLQCFDANELKRIKNELEPKMGMDLNLVQLIAYTDWNETQQKQADGKWVNYSYDWMFKPGAMAQIAQYADGIGPDYHMLVAEGSKPGAVKLTAMVKEAHASHLQVHPYTVRADQLPEYATNVNQLYDVLYNQAGVDGLFTDFPDKAVQFLDAKH

SEQ ID NO: 415 - protein, 356 aa, Klebsiella pneumoniae i225/94
MKMKLTALMSGMILSSSALCFSATAADKMVIAHRGASGYLPEHTLPAKAMAYAQGADYLEQDLVMTKDDRLVVLHDHYLDRVTDVAQRFPQRARKDGRFYAIDFTLDEIKSLKFTEGFEPKNGKNVQTYPGRFPMGKSDFRIHTFEEEIEFVQGLNHSTGKNIGIYPEIKAPWFHHQEGKDIAASTLKVLKEYGYTSKQDKVYLQCFDANELKRIKNELEPKMGMDLNLVQLIAYTDWNETQQKQADGKWVNYSYDWMFKPGAMAQIAQYADGIGPDYHMLVAEGSKPGAVKLTAMVKEAHASHLQVHPYTVRADQLPEYATNVNQLYDVLYNQAGVDGLFTDFPDKAVQFLDAKQ

SEQ ID NO: 416 - protein, 356 aa, Klebsiella pneumoniae D5050
MKLILTALMSGMILSSSALCFSATAADKMVIAHRGASGYLPEHTLPAKAMAYAQGADYLEQDLVMTKDDRLVVLHDHYLDRVTDVAQRFPQRARKDGRFYAIDFTLAEIKSLKFTEGFEPKNGKNVQTYPGRFPMGKSDFRIHTFEEEIEFVQGLNHSTGKNIGIYPEIKAPWFHHQEGKDIAASTLKVLKEYGYTSKQDKVYLQCFDANELKRIKNELEPKMGMDLNLVQLIAYTDWNETQQKQADGKWVNYSYDWMFKPGAMAQIAQYADGIGPDYHMLVAEGSKPGAVKLTAMVKEAHASHLQVHPYTVRADQLPEYATNVNQLYDVLYNQAGVDGLFTDFPDKAVQFLDAKH

SEQ ID NO: 417 - protein, 356 aa, Klebsiella pneumoniae E5051
MKMKLTALMSGMILSSSALCFSATAADKMVIAHRGASGYLPEHTLPAKAMAYAQGADYLEQDLVMTKDDRLVVLHDHYLDRVTDVAQRFPQRARKDGRFYAIDFTLAEIKSLKFTEGFEPKNGKNVQTYPGRFPMGKSDFRIHTFEEEIEFVQGLNHSTGKNIGIYPEIKAPWFHHQEGKDIAASTLKVLKEYGYTSKQDKVYLQCFDANELKRIKNELEPKMGMDLNLVQLIAYTDWNETQQKQADGKWVNYSYDWMFKPGAMAQIAQYADGIGPDYHMLVAEGSKPGAVKLTAMVKEAHASHLQVHPYTVRADQLPEYATNVNQLYDVLYNQAGVDGLFTDFPDKAVQFLDAKH

SEQ ID NO: 418 - protein, 356 aa, Klebsiella pneumoniae Aerogenes4140
MKMKLTALMSGMILSSSALCFSATAADKMVIAHRGASGYLPEHTLPAKAMAYAQGTDYLEQDLVMTKDDRLVVLHDHYLDRVTDVAQRFPQRARKDGRFYAIDFTLAEIKSLKFTEGFEPKNGKNVQTYPGRFPMGKSDFRIHTFEEEIEFVQGLNHSTGKNIGIYPEIKAPWFHHQEGKDIAASTLKVLKEYGYTSKQDKVYLQCFDANELKRIKNELEPKMGMDLNLVQLIAYTDWNETQQKQADGKWVNYSYDWMFKPGAMAQIAQYADGIGPDYHMLVAEGSKPGAVKLTAMVKEAHASHLQVHPYTVRADQLPEYATNVNQLYDVLYNQAGVDGLFTDFPDKAVQFLDAKQ

SEQ ID NO: 419 - protein, 356 aa, Klebsiella pneumoniae 1015; identical to SEQ ID NO: 216

SEQ ID NO: 420 - protein, 356 aa, Klebsiella pneumoniae 919
MKMKLTALMSGIILSSLPLCFSATAADKMVIAHRGASGYLPEHTLPAKAMAYAQGADYLEQDLVMTKDDRLVVLHDHYLDRVTDVAQRFPQRARQDGRFYAIDFTLDEIKSLKFTEGFEPKNGKNVQTYPGRFPMGKSDFRIHTFEEEIEFVQGLNHSTGKNIGIYPEIKAPWFHHQEGKDIAASTLKVLKEYGYTSKQDKVYLQCFDANELKRIKNELEPKMGMDLNLVQLIAYTDWNETQQKQADGKWVNYSYDWMFKPGAMAQIAQYADGIGPDYHMLVAEGSKPGAVKLTAMVKEAHASHLQVHPYTVRADQLPEYATNVNQLYDVLYNQAGVDGLFTDFPDKAVQFLDAKH

SEQ ID NO: 421 - protein, 356 aa, Klebsiella pneumoniae 313
MNMKLTALMSGMILSSSALCFSATAADKMVIAHRGASGYLPEHTLPAKAMAYAQGADYLEQDLVMTKDDRLVVLHDHYLDRVTDVAQRFPQRARKDGRFYAIDFTLDEIKSLKFTEGFEPKNGKNVQTYPGRFPMGKSDFRIHTFEEEIEFVQGLNHSTGKNIGIYPEIKAPWFHHQEGKDIAASTLKVLKEYGYTSKQDKVYLQCFDANELKRIKNELEPKMGMDLNLVQLIAYTDWNETQQKQADGKWVNYSYDWMFKPGAMAQIAQYADGIGPDYHMLVAEGSKPGAVKLTAMVKEAHASHLQVHPYTVRADQLPEYATNVNQLYDVLYNQAGVDGLFTDFPDKAVQFLDAKR

SEQ ID NO: 422 - protein, 356 aa, Klebsiella pneumoniae 1470
MSVNFPALMIVMILSSSALCFSATAADKMVIAHRGASGYLPEHTLPAKAMAYAQGTDYLEQDLVMTKDDRLVVLHDHYLDRVTDVAQRFPQRARKDGRFYAIDFTLAEIKSLKFTEGFEPKNGKNVQTYPGRFPMGKSDFRIHTFEEEIEFVQGLNHSTGKNIGIYPEIKAPWFHHQEGKDIAASTLKVLKEYGYTSKQDKVYLQCFDANELKRIKNELEPKMGMDLNLVQLIAYTDWNETQQKQADGKWVNYSYDWMFKPGAMAQIAQYADGIGPDYHMLVAEGSKPGAVKLTAMVKEAHASHLQVHPYTVRADQLPEYATNVNQLYDVLYNQAGVDGLFTDFPAKAVQFLDAKL

SEQ ID NO: 423 - protein, 356 aa, Klebsiella pneumoniae Mich61
MKMKLTALMSGIILSSSALCFSATAADKMVIAHRGASGYLPEHTLPAKAMAYAQGADYLEQDLVMTKDDRLVVLHDHYLDRVTDVAQRFPQRARKDGRFYAIDFTLAEIKSLKFTEGFEPKNGKNVQTYPGRFPMGKSDFRIHTFEEEIEFVQGLNHSTGKNIGIYPEIKAPWFHHQEGKDIAASTLKVLKEYGYTSKQDKVYLQCFDANELKRIKNELEPKMGMDLNLVQLIAYTDWNETQQKQADGKWVNYSYDWMFKPGAMAQIAQYADGIGPDYHMLVAEGSKPGAVKLTAMVKEAHASHLQVHPYTVRADQLPEYATNVNQLYDVLYNQAGVDGLFTDFPDKAVQFLDAKR

SEQ ID NO: 424 - protein, 356 aa, Klebsiella pneumoniae 2069/49
MKMKLTALMSGIILSSSALCFSATAADKMVIAHRGASGYLPEHTLPAKAMAYAQGADYLEQDLVMTKDDRLVVLHDHYLDRVTDVAQRFPQRARKDGRFYAIDFTLDEIKSLKFTEGFEPKNGKNVQTYPGRFPMGKSDFRIHTFEEEIEFVQGLNHSTGKNIGIYPEIKAPWFHHQEGKDIAASTLKVLKEYGYTSKQDKVYLQCFDANELKRIKNELEPKMGMDLNLVQLIAYTDWNETQQKQADGKWVNYSYDWMFKPGAMAQIAQYADGIGPDYHMLVAEGSKPGAVKLTAMVKEAHASHLQVHPYTVRADQLPEYATNVNQLYDVLYNQAGVDGLFTDFPDKAVQFLDAKR

SEQ ID NO: 425 - protein, 356 aa, Klebsiella pneumoniae 2005/49
MKMKLTALMSGMILSSSALCFSATAADKMVIAHRGASGYLPEHTLPAKAMAYAQGADYLEQDLVMTKDDRLVVLHDHYLDRVTDVAQRFPQRARKDGRFYAIDFTLDEIKSLKFTEGFEPKNGKYVQTYPGRFPMGKSDFRIHTFEEEIEFVQGLNHSTGKNIGIYPEIKAPWFHHQEGKDITASTLKVLKEYGYTSKQDKVYLQCFDANELKRIKNELEPKMGMDLNLVQLIAYTDWNETQQKQADGKWVNYSYDWMFKPGAMAQIAQYADGIGPDYHMLVAEGSKPGAVKLTAMVKEAHASHLQVHPYTVRADQLPEYATNVNQLYDVLYNQAGVDGLFTDFPDKAVQFLDAKQ

SEQ ID NO: 426 - protein, 356 aa, Klebsiella pneumoniae 1754/49
MKMKLTALMSGMILSSSALCFSATAADKMVIAHRGASGYLPEHTLPAKAMAYAQGADYLEQDLVMTKDDRLVVLHDHYLDRVTNVAQRFPQRARQDGRFYAIDFTLAEIKSLKFTEGFEPKNGKNVQTYPGRFPMGKSDFRIHTFEEEIEFVQGLNHSTGKNIGIYPEIKAPWFHHQEGKDIAASTLKVLKEYGYTSKQDKVYLQCFDANELKRIKNELEPKMGMDLNLVQLIAYTDWNETQQKQADGKWVNYSYDWMFKPGAMAQIAQYADGIGPDYHMLVAEGSKPGAVKLTAMVKEAHASHLQVHPYTVRADQLPEYATNVNQLYDVLYNQAGVDGLFTDFPDKAVQFLDAKH

SEQ ID NO: 427 - protein, 356 aa, Klebsiella pneumoniae 1702/49; identical to SEQ ID NO: 415

SEQ ID NO: 428 - protein, 356 aa, Klebsiella pneumoniae i202/94
MNMKLTTLMSGMMLASSALCFSATAADKMVIAHRGASGYLPEHTLPAKAMAYAQGADYLEQDLVMTKDDRLVVLHDHYLDRVTDVAQRFPQRARQDGRFYAIDFTLAEIKSLKFTEGFEPKDGKNVQTYPGRFPMGKSDFRIHTFEEEIEFVQGLNHSTGKNIGIYPEIKAPWFHHQEGKDIAASTLKVLKEYGYTSKQDKVYLQCFDANELKRIKNELEPKMGMDLNLVQLIAYTDWNETQQKQADGQWVNYSYDWMFKPGAMAQIAQYADGIGPDYHMLVAEGSKPGAVKLTAMVKEAHASHLQVHPYTVRADQLPEYATNVNQLYDLLYNQAGVDGLFTDFPDKAVQFLDAKR

SEQ ID NO: 429 - protein, 356 aa, Klebsiella pneumoniae 1996/49; identical to SEQ ID NO: 418

SEQ ID NO: 430 - protein, 356 aa, Klebsiella pneumoniae 1680/49
MRMKLTALMSVMILSSSALCFSATAADKMVIAHRGASGYLPEHTLPAKAMAYAQGADYLEQDLVMTKDDRLVVLHDHYLDRVTDVAQHFPQRARQDGRFYAIDFTLDEIKSLKFTEGFEPKNGKNVQTYPGRFPMGKSDFRIHTFEEEIEFVQGLNHSTGKNIGIYPEIKAPWFHHQEGKDIAASTLKVLKEYGYTSKQDKVYLQCFDANELKRIKNELEPKMGMDLNLVQLIAYTDWNETQQKQADGKWVNYSYDWMFKPGAMAQIAQYADGIGPDYHMLVAEGSKPGAVKLTAMVKEAHASHLQVHPYTVRADQLPEYATNVNQLYDVVYNQAGAIGVVTDFPAKAVQLGNAIL

SEQ ID NO: 431 - protein, 356 aa, Klebsiella pneumoniae 2002/49; identical to SEQ ID NO: 415

SEQ ID NO: 432 - protein, 356 aa, Klebsiella pneumoniae 6613
MNMKLTALMSGMILASSALCFSAVAAEKMDIAHRGASGYLPEHTLPAKAMAYAQGADYLEQDLVMTKDDRLVVLHDHYLDRVTDVAQRFPQRARKDGRFYAIDFTLAEIKSLKFTEGFEPKNGKNVQTYPGRFPMGKSDFRIHTFEEEIEFVQGLNHSTGKNIGIYPEIKAPWFHHQEGKDIAASTLKVLKEYGYTSKQDKVYLQCFDANELKRIKNELEPKMGMDLNLVQLIAYTDWNETQQKQADGKWVNYSYDWMFQPGAMAQIAQYADGIGPDYHMLVAEGSKPGAVKLTAMVKEAHASHLQVHPYTVRADQLPEYATNVNQLYDLLYHQAGVDGLFTDLPAKAVQFRDAKQ

SEQ ID NO: 433 - protein, 356 aa, Klebsiella pneumoniae 5758
MNMKLTALMSGMILASSALCFSAVAAEKMVIAHRGASGYLPEHTLPAKAMAYAQGADYLEQDLVMTKDDRLVVLHDHYLDRVTDVAQRFPQRARKDGRFYAIDFTLAEIKSLKFTEGFEPKNGKNVQTYPGRFPMGKSDFRIHTFEEEIEFVQGLNHSTGKNIGIYPEIKAPWFHHQEGKDIAASTLKVLKEYGYTSKQDKVYLQCFDANELKRIKNELEPKMGMDLNLVQLIAYTDWNETQQKQADGKWVNYSYDWMFQPGAMAQIAQYADGIGPDYHMLVAEGSKPGAVKLTAMVKEAHASHLQVHPYTVRADQLPEYATNVNQLYDLLYHQAGVDGLFTDFPDKAVQFLDAKQ

SEQ ID NO: 434 - protein, 356 aa, Klebsiella pneumoniae 7824; identical to SEQ ID NO: 415

SEQ ID NO: 435 - protein, 356 aa, Klebsiella pneumoniae 6258; identical to SEQ ID NO: 415

SEQ ID NO: 436 - protein, 356 aa, Klebsiella pneumoniae 6168
MKMKLTALMSGMILSSSALCFSATAADKMVIAHRGASGYLPEHTLPAKAMAYAQGADYLEQDLVMTKDDRLVVLHDHYLDRVTDVAQRFPQRARKDGRFYAIDFTLDEIKSLKFTEGFEPKNGKNVQTYPGRFPMGKSDFRIHTFEEEIEFVQGLNHSTGKNIGIYPEIKAPWFHHQEGKDIAASTLKVLKEYGYTSKQDKVYLQCFDANELKRIKNELEPKMGMDLNLVQLIAYTDWNETQQKQADGKWVNYSYDWMFKPGAMAQIAQYADGIGPDYHMLVAEGSKPGAVKLTAMVKEAHASHLQVHPYTVRADQLPEYATNVNQLYDVLYNQAGVDGLFTDFPDKAVQFLDAKH

SEQ ID NO: 437 - protein, 356 aa, Klebsiella pneumoniae i256/94; identical to SEQ ID NO: 216

SEQ ID NO: 438 - protein, 356 aa, Klebsiella pneumoniae 7749; identical to SEQ ID NO: 417

SEQ ID NO: 439 - protein, 356 aa, Klebsiella pneumoniae 5281
MKMKLTALMSGMILSSSPLCFSATAADKMVIAHRGASGYLPEHTLPAKAMAYAQGADYLEQDLVMTKDDRLVVLHDHYLDRVTDVAQHFPQRARQDGRFYAIDFTLDEIKSLKFTEGFEPKNGKNVQTYPGRFPMGKSDFRIHTFEEEIEFVQGLNHSTGKNIGIYPEIKAPWFHHQEGKDIAASTLKVLKEYGYTSKQDKVYLQCFDANELKRIKNELEPKMGMDLNLVQLIAYTDWNETQQKQADGKWVNYSYDWMFKPGAMAQIAQYADGIGPDYHMLVAEGSKPGAVKLTAMVKEAHASHLQVHPYTVRADQLPEYATNVNQLYDVLYNQAGVDGLFTDFPDKAVQFLHANR

SEQ ID NO: 440 - protein, 356 aa, Klebsiella pneumoniae i224/94
MKMKLTALMSGIILSSSALCFSATAADKMVIAHRGASGYLPEHTLPAKAMAYAQGADYLEQDLVMTKDDRLVVLHDHYLDRVTDVAQRFPQRARQDGRFYAIDFTLAEIKSLKFTEGFEPKNGKNVQTYPGRFPMGKSDFRIHTFEEEIEFVQGLNHSTGKNIGIYPEIKAPWFHHQEGKDIAASTLKVLKEYGYTSKQDKVYLQCFDANELKRIKNELEPKMGMDLNLVQLIAYTDWNETQQKQADGKWVNYSYDWMFKPGAMAQIAQYADGIGPDYHMLVAEGSKPGAVKLTAMVKEAHASHLQVHPYTVRADQLPEYATNVNQLYDVLYNQAGVDGLFTDFPDKAVQFLDAKR

SEQ ID NO: 441 - protein, 356 aa, Klebsiella pneumoniae 3985/51; identical to SEQ ID NO: 415

SEQ ID NO: 442 - protein, 356 aa, Klebsiella pneumoniae i221/94
MTMNFPALMIVMIPSSSALCFSATAADKMVIAHRGASGYLPEHTLPAKAMAYAQGADYLEQDLVMTKDDRLVVLHDHYLDRVTDVAQRFPQRARKDGRFYAIDFTLDEIKSLKFTEGFEPKNGKNVQTYPGRFPMGKSDFRIHTFEEEIEFVQGLNHSTGKNIGIYPEIKAPWFHHQEGKDIAASTLKVLKEYGYTSKQDKVYLQCFDANELKRIKNELEPKMGMDLNLVQLIAYTDWNETQQKQADGKWVNYSYDWMFKPGAMAQIAQYADGIGPDYHMLVAEGSKPGAVKLTAMVKEAHASHLQVHPYTVRADQLPEYATNVNQLYDVLYNQAGVDGLFTDFPDKAVQFGDAKL

SEQ ID NO: 443 - protein, 356 aa, Klebsiella pneumoniae 4463/52
MNMKLTALMSGMMLASSALCFSATAADKLDIAHRGASGYLPEHTLPAKAMAYAQGADYLEQDLVMTKDDRLVVLHDHYLDRVTDVAQRFPQRARQDGRFYAIDFTLAEIKSLKFTEGFEPKDGKNVQTYPGRFPMGKSDFRIHTFEEEIEFVQGLNHSTGKNIGIYPEIKAPWFHHQEGKDIAASTLKVLKEYGYTSKQDKVYLQCFDANELKRIKNELEPKMGMDLNLVQLIAYTDWNETQQKQADGQWVNYSYDWMFKSGAMAQIAQYADGIGPDYHMLVAEGSKPGAVKLTAMVKEAHASHLQVHPYTVRADQLPEYATNVNQLYDLLYNQAGVDGLFTDFPDKAVQFLDAKR

SEQ ID NO: 444 - protein, 356 aa, Klebsiella pneumoniae 5710/52; identical to SEQ ID NO: 424

SEQ ID NO: 445 - protein, 356 aa, Klebsiella pneumoniae 5711/52; identical to SEQ ID NO: 418

SEQ ID NO: 446 - protein, 356 aa, Klebsiella pneumoniae 5845/52; identical to SEQ ID NO: 216

SEQ ID NO: 447 - protein, 356 aa, Klebsiella pneumoniae NCTC8172
MKMKLTALMSGMILSSSALCFSATAADKMVIAHRGASGYLPEHTLPAKAMAYAQGADYLEQDLVMTKDDRLVVLHDHYLDRVTDVAQRFPQRARKDGRFYAIDFTLDEIKSLKFTEGFEPKNGKNVQTYPGRFPMGKSDFRIHTFEEEIEFVQGLNHSTGKNIGIYPEIKAPWFHHQEGKDIAASTLKVLKEYGYTSKQDKVYLQCFDANELKRIKNELEPKMGMDLNLVQLIAYTDWNETQQKQADGKWVNYSYDWMFKPGAMAQIAQYADGIGPDYHMLVAEGSKPGAVKLTAMVKEAHASHLQVHPYTVRADQLPEYATNVNQLYDILYNQAGVDGLFTDFPDKAVQFLDAKR

SEQ ID NO: 448 - protein, 356 aa, Klebsiella pneumoniae 708
MKMKLTALMSGIILSSSALCFSATAADKMVIAHRGASGYLPEHTLPAKAMAYAQGADYLEQDLVMTKDDRLVVLHDHYLDRVTDVAQRFPQRARKDGRFYAIDFTLDEIKSLKFTEGFEPKNGKNVQTYPGRFPMGKSDFRIHTFEEEIEFVQGLNHSTGKNIGIYPEIKAPWFHHQEGKDIAASTLKVLKEYGYTSKQDKVYLQCFDANELKRIKNELEPKMGMDLNLVQLIAYTDWNETQQKQADGKWVNYSYDWMFKPGAMAQIAQYADGIGPDYHMLVAEGSKPGAVKLTAMVKEAHASHLQVHPYTVRADQLPEYATNVNQLYDVLYNQAGVDGLFTDFPDKAVQFLDAKQ

SEQ ID NO: 449 - protein, 356 aa, Klebsiella pneumoniae 370; identical to SEQ ID NO: 448

SEQ ID NO: 450 - protein, 356 aa, Klebsiella pneumoniae Friedlaender204; identical to SEQ ID NO: 425

SEQ ID NO: 451 - protein, 356 aa, Klebsiella pneumoniae 5053; identical to SEQ ID NO: 423

SEQ ID NO: 452 - protein, 168 aa, Klebsiella pneumoniae MGH78578; identical to SEQ ID NO: 191

SEQ ID NO: 453 - protein, 168 aa, Klebsiella pneumoniae A5054
VPVTEPSSRRSGYARLLDRAIRILAMRDHSEQELRRKLVAPVMSKNGPEALDVTPDELEQVVAWCIENRYLDDNRFVGQFIASRSRKGYGPARIRQELSQKGIARQVVDQAMRKCDIDWVSLAREQAQRKYGEPLPSAFTEKVKVQRFLLYRGYLMEDIQEIWRNFAD

SEQ ID NO: 454 - protein, 168 aa, Klebsiella pneumoniae B5055
VPVTDPSSRRSGYARLLDRAIRILAMRDHSEQELRRKLVAPVMSKNGPEALDVTPDELEQVVAWCIENRYLDDNRFVGQFIASRSRKGYGPARIRQELSQKGIARQVVDQAMRECDIDWVSFAREQAQRKYGEPLPSAFTEKVKVQRFLLYRGYLMEDIQEIWRNFAD

SEQ ID NO: 455 - protein, 168 aa, Klebsiella pneumoniae i225/94; identical to SEQ ID NO: 191

SEQ ID NO: 456 - protein, 168 aa, Klebsiella pneumoniae D5050; identical to SEQ ID NO: 191

SEQ ID NO: 457 - protein, 168 aa, Klebsiella pneumoniae E5051; identical to SEQ ID NO: 191

SEQ ID NO: 458 - protein, 168 aa, Klebsiella pneumoniae Aerogenes4140; identical to SEQ ID NO: 191

SEQ ID NO: 459 - protein, 168 aa, Klebsiella pneumoniae 1015; identical to SEQ ID NO: 191

SEQ ID NO: 460 - protein, 168 aa, Klebsiella pneumoniae i262/94
VPVTEPSSRRSGYARLLDRAIRILAMRDHSEQELRGKLAAPVMSKNGPEALDVTPEELEQVVAWCIENRYLDDNRFVGQFIASRGRKGYGPARIRQELSQKGIARQVVDQAMRECDIDWVSLAREQAQRKYGEPLPSAFTEKVKVQRFLLYRGYLMEDIQEIWRNFAD

SEQ ID NO: 461 - protein, 168 aa, Klebsiella pneumoniae 919
VPVTEPSSRRSGYARLLDRAIRILAMRDHSEQELRRKLVAPVMSKNGPEALDATPDELEQVVAWCIENRYLDDNRFVGQFIASRSRKGYGPARIRQELSQKGIARQVVDQAMRECDIDWVSLAREQAQRKYGEPLPSAFTEKVKVQRFLLYRGYLMEDIQEIWRNFAD

SEQ ID NO: 462 - protein, 168 aa, Klebsiella pneumoniae 313; identical to SEQ ID NO: 461

SEQ ID NO: 463 - protein, 168 aa, Klebsiella pneumoniae 1470; identical to SEQ ID NO: 191

SEQ ID NO: 464 - protein, 168 aa, Klebsiella pneumoniae 1193; identical to SEQ ID NO: 191

SEQ ID NO: 465 - protein, 168 aa, Klebsiella pneumoniae Mich61; identical to SEQ ID NO: 453

SEQ ID NO: 466 - protein, 168 aa, Klebsiella pneumoniae 2069/49; identical to SEQ ID NO: 191

SEQ ID NO: 467 - protein, 168 aa, Klebsiella pneumoniae 2005/49
VPVTDPSSRRSGYARLLDRAIRILAMRDHSEQELRRKLVAPVISKNGPEALDVTPDELEQVVAWCIEKRYLDDNRFVGQFIASRSRKGYGPARIRQELSQKGIARQVVDQAMRECDIDWVSLAREQAQRKYGEPLPSAFTEKVKVQRFLLYRGYLMEDIQEIWRNFAD

SEQ ID NO: 468 - protein, 168 aa, Klebsiella pneumoniae 1754/49; identical to SEQ ID NO: 191

SEQ ID NO: 469 - protein, 168 aa, Klebsiella pneumoniae 1702/49
VPVTDPSSRRSGYARLLDRAIRILAMRDHSEQELRRKLVAPVMSKNGPEALDVTPDELEQVVAWCIENRYLDDNRFVGQFIASRSRKGYGPARIRQELSQKGIARQVVDQAMRECDIDWVSLAREQAQRKYGEPLPSAFTEKVKVQRFLLYRGYLMEDIQEIWRNFAD

SEQ ID NO: 470 - protein, 168 aa, Klebsiella pneumoniae i202/94
VPVTEPSSRRSGYARLLDRAIRILAMRDHSEQELRRKLAAPVMSKNGPEALDVTPEELEQVVAWCIENRYLDDNRFVGQFIASRSRKGYGPARIRQELSQKGIARQAVEQAMRECDIDWVSLARAQAQRKYGEPLPSAFAEKVKIQRFLLYRGYLMEDIQEIWRNFAD

SEQ ID NO: 471 - protein, 168 aa, Klebsiella pneumoniae 1996/49; identical to SEQ ID NO: 191

SEQ ID NO: 472 - protein, 168 aa, Klebsiella pneumoniae 1680/49; identical to SEQ ID NO: 191

SEQ ID NO: 473 - protein, 168 aa, Klebsiella pneumoniae 2002/49; identical to SEQ ID NO: 191

SEQ ID NO: 474 - protein, 168 aa, Klebsiella pneumoniae 6613
VPVTEPSSRRSGYARLLDRAIRILAMRDHSEQELRRKLVAPVMSKNGPEALDATPDELEQVVAWCIENRYLDDNRFVGQFIASRSRKGYGPARIRQELSQKGIARQVVDQAMRKCDIDWVSLAREQAQRKYGEPLPSAFTEKVKVQRFLLYRGYLMEDIQEIWRNFAD

SEQ ID NO: 475 - protein, 168 aa, Klebsiella pneumoniae 5758; identical to SEQ ID NO: 474

SEQ ID NO: 476 - protein, 168 aa, Klebsiella pneumoniae 5725y
LPVTETSSRRSDYARLLDRAIRILAMRDHSEQELRRKLAAPVMSKNGPEALNVTPEEVDNVVEWCIENRYLDDERFVRQFIASRSRKGYGPARVRQELKQKGISRETIEAAMRECEIDWAQLAKEQAQRKYGEPLPTVFAEKVKIQRFLLYRGYLMEDIQEIWRNFAD

SEQ ID NO: 477 - protein, 168 aa, Klebsiella pneumoniae 7824
VPVTDASSRRSGYARLLDRAIRILAMRDHSEQELRRKLVAPVMSKNGPEALDVTPDELEQVVAWCIENRYLDDNRFVGQFIASRSRKGYGPARIRQELSQKGIARQVVDQAMRECDIDWVSLAREQAQRKYGEPLPSAFTEKVKVQRFLLYRGYLMEDIQEIWRNFAD

SEQ ID NO: 478 - protein, 168 aa, Klebsiella pneumoniae 6258; identical to SEQ ID NO: 461

SEQ ID NO: 479 - protein, 168 aa, Klebsiella pneumoniae 6168; identical to SEQ ID NO: 461

SEQ ID NO: 480 - protein, 168 aa, Klebsiella pneumoniae i256/94; identical to SEQ ID NO: 191

SEQ ID NO: 481 - protein, 168 aa, Klebsiella pneumoniae 7749; identical to SEQ ID NO: 191

SEQ ID NO: 482 - protein, 168 aa, Klebsiella pneumoniae 2482
VPVTEPSSRRSGYARLLDRAIRILAMRDHSEQELRRKLVAPVMSKNGPEALDVTPDELEQVVAWCIENRYLDDNRFVGQFIASRSRKGYGPARIRQELSQKGIARQAVEQAMRECDIDWVSLAREQAQRKYGEPLPSAFTEKVKVQRFLLYRGYLMEDIQEIWRNFAD

SEQ ID NO: 483 - protein, 168 aa, Klebsiella pneumoniae 5281; identical to SEQ ID NO: 191

SEQ ID NO: 484 - protein, 168 aa, Klebsiella pneumoniae i224/94; identical to SEQ ID NO: 469

SEQ ID NO: 485 - protein, 168 aa, Klebsiella pneumoniae 1756/51
VPVTEPSSRRSGYARLLDRAIRILAMRDHSEQELRRKLVAPVMSKNGPEALDVTPEELEQVVAWCIENRYLDDHRFVGQFIASRSRKGYGPARIRQELSQKGIARQDVDQAMRECDIDWVSLAREQAQRKYGEPLPSAFTEKVKVQRFLLYRGYLMEDIQEIWRNFAD

SEQ ID NO: 486 - protein, 168 aa, Klebsiella pneumoniae Stanley
VPVTEPSSRRSGYARLLDRAIRILAMRDHSEQELRRKLAAPVMSKNGPEALDVTPEELEQVVAWCIENRYLDDHRFVGQFIASRSRKGYGPARIRQELSQKGIARQDVEQAMRECDIDWVSLAREQAQRKYGEPLPSAFTEKVKVQRFLLYRGYLMEDIQEIWRNFAD

SEQ ID NO: 487 - protein, 168 aa, Klebsiella pneumoniae 3985/51; identical to SEQ ID NO: 461

SEQ ID NO: 488 - protein, 168 aa, Klebsiella pneumoniae i221/94; identical to SEQ ID NO: 461

SEQ ID NO: 489 - protein, 168 aa, Klebsiella pneumoniae 4463/52
VPVTEPSSRRSGYARLLDRAIRILAMRDHSEQELRRKLAAPVMSKNGPEALDVIPEELEQVVAWCIENRYLDDNRFVGQFIASRSRKGYGPARIRQELSQKGIARQAVEQAMRECDIDWVSLARAQAQRKYGEPLPSAFAEKVKIQRFLLYRGYLMEDIQEIWRNFAD

SEQ ID NO: 490 - protein, 168 aa, Klebsiella pneumoniae 5710/52
VPVTEPSSRRSGYARLLDRAIRILAMRDHSEQELRRKLDAPVMSKNGPEALDVTPDELEQVVAWCIENRYLDDNRFVGQFIASRSRKGYGPARIRQELSQKGIARQVVDQAMRECDIYWVSLAREQAQRKYGEPLPSAFTEKVKVQRFLLYRGYLMEDIQEIWRNFAD

SEQ ID NO: 491 - protein, 168 aa, Klebsiella pneumoniae 5711/52; identical to SEQ ID NO: 191

SEQ ID NO: 492 - protein, 168 aa, Klebsiella pneumoniae 5845/52; identical to SEQ ID NO: 474

SEQ ID NO: 493 - protein, 168 aa, Klebsiella pneumoniae NCTC8172; identical to SEQ ID NO: 191

SEQ ID NO: 494 - protein, 168 aa, Klebsiella pneumoniae 264-1
LTVTETSSRRSDYARLLDRAIRILAMRDHSEQELRRKLAAPVMSKNGPEALDVTPEEVDKVVEWCIENRYLDDERFVRQFIASRSRKGYGPARVRQELKQKGISRETTEAAMRECEIDWARLAKEQAQRKYGEPLPSVFAEKVKIQRFLLYRGYLMEDIQEIWRNFAD

SEQ ID NO: 495 - protein, 168 aa, Klebsiella pneumoniae 265-1
VPVTESSSRRSGYARLLDRAIRILAMRDHSEQELRRKLAAPVMGKNGPEALDVTPEEVDRVVAWCIENRYLDDQRFVRQFIASRSRKGYGPARIRQELNQKGIAREEGERAMRECEIDWALLAKEQAQRKYGDPLPTVFAEKVKIQRFLLYRGYLMEDIQEIWRNFAD

SEQ ID NO: 496 - protein, 168 aa, Klebsiella pneumoniae 889
VPVTESTSRRSGYARLLDRAIRILAMRDHSEQELRRKLAAPVMGKNGPEALDVTPEEVDRVVAWCIENRYLDDQRFVRQFIASRSRKGYGPARIRQELNQKGIAREEGERAMRECEIDWALLAKEQAQRKYGDPLPTVFAEKVKIQRFLLYRGYLMEDIQEIWRNFAD

SEQ ID NO: 497 - protein, 168 aa, Klebsiella pneumoniae 708; identical to SEQ ID NO: 453

SEQ ID NO: 498 - protein, 168 aa, Klebsiella pneumoniae 370; identical to SEQ ID NO: 453

SEQ ID NO: 499 - protein, 168 aa, Klebsiella pneumoniae Friedlaender204; identical to SEQ ID NO: 191

SEQ ID NO: 500 - protein, 168 aa, Klebsiella pneumoniae 5053; identical to SEQ ID NO: 453

SEQ ID NO: 501 - protein, 397 aa, Klebsiella pneumoniae MGH78578; identical to SEQ ID NO: 235

SEQ ID NO: 502 - protein, 397 aa, Klebsiella pneumoniae A5054
VVRFDAVVVGAGAAGMFCAAQAGQLGCRVLLLDNGKKPGRKILMSGGGRCNFTNMYVEPAAYLSQNPHFCKSALARYTQWDFIELVGKYGIAWHEKTLGQLFCDDSAEQIVNLLLAECGKGGVQIRLRSEILSVERDEQGYRLQVNGETLVTKKLVIASGGLSMPGLGASPFGYKVAEQFGLKVLPTRAGLVPFTLHKPLLEQLQVLSGVSVPSTITAENGTLFRENLLFTHRGLSGPAVLQISSYWQPGEFVTVNLLPDCDLDDFLNEQRSAHPNQSLKNTLAMQLPKRLVECLQQLGQIPDVTLKQLNVRDQQTLVETLTAWRVQPNGTEGYRTAEVTLGGVDTNELSSRTMEARKAPGLYFIGEVMDVTGWLGGYNFQWAWSSAWACAQALMEG

SEQ ID NO: 503 - protein, 397 aa, Klebsiella pneumoniae B5055
VERFDAVVVGAGAAGMFCAAQAGQLGCRVLLLDNGKKPGRKILMSGGGRCNFTNMYVEPAAYLSQNPHFCKSALARYTQWDFIELVGKYGIAWHEKTLGQLFCDDSAEQIVNLLLAECEKGGVQIRLRSEILSVERDEQGYRLQVNGETLMTKKLVIASGGLSMPGLGASPFGYKVAEQFGLKVLPTRAGLVPFTLHKPLLEQLQVLSGVSVPSTITAENGTLFRENLLFTHRGLSGPAVLQISSYWQPGEFVTVNLLPDCDLDDFLNEQRSAHPNQSLKNTLAMQLPKRLVECLQQLGQIPDVTLKQLNVRDQQTLVETLTAWRVQPNGTEGYRTAEVTLGGVDTNELSSRTMEARKAPGLYFIGEVMDVTGWLGGYNFQWAWSSAWACAQALVEG

SEQ ID NO: 504 - protein, 397 aa, Klebsiella pneumoniae i225/94
VERFDAIVVGAGAAGMFCAAQAGQLGCRVLLLDNGKKPGRKILMSGGGRCNFTNMYVEPAAYLSQNPHFCKSALARYTQWDFIELVGKYGIAWHEKTLGQLFCDDSAEQIVNLLLAECEKGGVQIRLRSEILSVERDEQGYRLQVNGETLTAKKLVIASGGLSMPGLGASPFGYKVAEQFGLKVLPTRAGLVPFTLHKPLLEQLQVLSGVSVPSTITAENGTLFRENLLFTHRGLSGPAVLQISSYWQPGEFVTVNLLPDCDLDDFLNEQRSAHPNQSLKNTLAMQLPKRLVECLQQLGQIPDVTLKQLNVRDQQTLVETLTAWRVQPNGTEGYRTAEVTLGGVDTNELSSRTMEARKAPGLYFIGEVMDVTGWLGGYNFQWAWSSAWACAQALVEG

SEQ ID NO: 505 - protein, 397 aa, Klebsiella pneumoniae D5050
VERFDAIVVGAGAAGMFCAAQAGQLGCRVLLLDNGKKPGRKILMSGGGRCNFTNMYVEPAAYLSQNPHFCKSALARYTQWDFIELVGKYGIAWHEKTLGQLFCDDSAEQIVNLLLAECEKGDVQIRLRSEILSVERDEQGYRLQVNGETLMTKKLVIASGGLSMPGLGASPFGYKVAEQFGLKVLPTRAGLVPFTLHKPLLEQLQVLSGVSVPSTITAENGTLFRENLLFTHRGLSGPAVLQISSYWQPGEFVTVNLLPDCDLDDFLNEQRSAHPNQSLKNTLAMQLPKRLVECLQQLGQIPDVTLKQLNVRDQQTLVETLTAWRVQPNGTEGYRTAEVTLGGVDTNELSSRTMEARKAPGLYFIGEVMDVTGWLGGYNFQWAWSSAWACVQALVEG

SEQ ID NO: 506 - protein, 397 aa, Klebsiella pneumoniae E5051
VERFDAIVVGAGAAGMFCAAQAGQLGCRVLLLDNGKKPGRKILMSGGGRCNFTNMYVEPAAYLSQNPHFCKSALARYTQWDFIELVGKYGIAWHEKTLGQLFCDDSAEQIVNLLLAECEKGDVQIRLRSEILSVERDEQGYRLQVNGETLMTKKLVIASGGLSMPGLGASPFGYKVAEQFGLKVLPTRAGLVPFTLHKPLLEQLQVLSGVSVPSTITAENGTLFRENLLFTHRGLSGPAVLQISSYWQPGEFVTVNLLPDCDLDDFLNEQRSAHPNQSLKNTLAMQLPKRLVECLQQLGQIPDVTLKQLNVRDQQTLVETLTAWRVQPNGTEGYRTAEVTLGGVDTNELSSRTMEARKAPGLYFIGEVMDVTGWLGGYNFQWAWSSAWACAQALVEG

SEQ ID NO: 507 - protein, 397 aa, Klebsiella pneumoniae Aerogenes4140
VERFDAIVVGAGAAGMFCAAQAGQLGCRVLLLDNGKKPGRKILMSGGGRCNFTNMYVEPAAYLSQNPHFCKSALARYTQWDFIELVGKYGIAWHEKTLGQLFCDDSAEQIVNLLLAECEKGGVQIRLRSEILSVERDEQGYRLQVNGETLVTKKLVIASGGLSMPGLGASPFGYKVAEQFGLKVLPTRAGLVPFTLHKPLLEQLQVLSGVSVPSTITAENGTLFRENLLFTHRGLSGPAVLQISSYWQPGEFVTVNLLPDCDLDDFLNEQRSAHPNQSLKNTLAMQLPKRLVECLQQLGQIPDVTLKQLNVRDQQTLVETLTAWRVQPNGTEGYRTAEVTLGGVDTNELSSRTMEARKAPGLYFIGEVMDVTGWLGGYNFQWAWSSAWACAQALVEE

SEQ ID NO: 508 - protein, 397 aa, Klebsiella pneumoniae 1015
VERFDAIVVGAGAAGMFCAAQAGQLGCRVLLLDNGKKPGRKILMSGGGRCNFTNMYVEPAAYLSQNPHFCKSALARYTQWDFIELVGKYGIAWHEKTLGQLFCDDSAEQIVNLLLAECEKGGVQIRLRSEILSVERDEQGYRLQVNGETLVTKKLVIASGGLSMPGLGASPFGYKVAEQFGLKVLPTRAGLVPFTLHKPLLEQLQVLSGVSVPSTITAENGTLFRENLLFTHRGLSGPAVLQISSYWQPGEFVTVNLLPDCDLDDFLNEQRSAHPNQSLKNTLAMQLPKRLVECLQQLGQIPDVTLKQLNVRDQQTLVETLTAWRVQPNGTEGYRTAEVTLGGVDTNELSSRTMEARKAPGLYFIGEMMDVTGWLGGYNFQWAWSSAWACAQALVEG

SEQ ID NO: 509 - protein, 397 aa, Klebsiella pneumoniae Mich61
VERFDAIVVGAGAAGMFCAAQAGQLGCRVLLLDNGKKPGRKILMSGGGRCNFTNMYVEPAAYLSQNPHFCKSALARYTQWDFIELVGKYGIAWHEKTLGQLFCDDSAEQIVNLLLAECEKGGVQIRLRSEILSVERDEQGYRLQVNGETLVTKKLVIASGGLSMPGLGASPFGYKVAEQFGLKVLPTRAGLVPFTLHKPLLEQLQVLSGVSVPSTITAENGTLFRENLLFTHRGLSGPAVLQISSYWQPGEFVTVNLLPDCDLDDFLNEQRSAHPNQSLKNTLAMQLPKRLVECLQQLGQIPDVTLKQLNVRDQQTLVETLTAWRVQPNGTEGYRTAEVTLGGVDTNELSSRTMEARKAPGLYFIGEVMDVTGWLGGYNFQWAWSSAWACAQALVEG

SEQ ID NO: 510 - protein, 397 aa, Klebsiella pneumoniae 2069/49
VERFDAIVVGAGAAGMFCAAQAGQLGCRVLLLDNGKKPGRKILMSGGGRCNFTNMYVEPAAYLSQNPHFCKSALARYTQWDFIELVGKYGIAWHEKTLGQLFCDDSAEQIVNLLLAECEKGGVQIRLRSEILSVESDEQGYRLQVNGETLMTKKLVIASGGLSMPGLGASPFGYKVAEQFGLKVLPTRAGLVPFTLHKPLLEQLQVLSGVSVPSTITAENGTLFRENLLFTHRGLSGPAVLQISSYWQPGEFVTVNLLPDCDLDDFLNEQRSAHPNQSLKNTLAMQLPKRLVECLQQLGQIPDVTLKQLNVRDQQTLVETLTAWRVQPNGTEGYRTAEVTLGGVDTNELSSRTMEARKAPGLYFIGELMDVTGWLGGYNFQWAWSSAWACAQALVEG

SEQ ID NO: 511 - protein, 397 aa, Klebsiella pneumoniae i243/94
VERFDAIVVGDRAAGMFCTPDAGPLGCRVLLVDKGIKMGRKILMAGGGRCNFTNMYVEPAAYLSQNPHFCKSALARYTQWDFIELVGKYGIAWHEKTLGQLFCDDSAEQIVNLLLAECEKGDVQIRLRSEILSVERDEQGYRLQVNGETLMTKKLVIASGGLSMPGLGASPFGYKVAEQFGLKVLPTRAGLVPFTLHKPLLEQLQVLSGVSVPSTITAENGTLFRENLLFTHRGLSGPAVLQISSYWQPGEFVTVNLLPDCNLEDFLNEQRSAHPNQSLKNTLAMQLPKRLVECLQQLGQIPDVTLKQLNVRDQQTLVETLTAWRVQPNGTEGYRTAEVTLGGVDTNELSSRTTEARKASGLYFIGEMMDVTGRLGRYKTQSAWSSLHASYQAHQEG

SEQ ID NO: 512 - protein, 397 aa, Klebsiella pneumoniae 2005/49; identical to SEQ ID NO: 504

SEQ ID NO: 513 - protein, 397 aa, Klebsiella pneumoniae 1754/49
VERFDAIVVGAGAAGMFCAAQAGQLGCRVLLLDNGKKPGRKILMSGGGRCNFTNMYVEPAAYLSQNPHFCKSALARYTQWDFIELVGKYGIAWHEKTLGQLFCDDSAEQIVNLLLAECEKGGVQIRLRSEILSVERDEQGYRLQVNGETLVTKKLVIASGGLSMPGLGASPFGYKVAEQFGLKVLPTRAGLVPFTLHKPLLEQLQVLSGVSVPSTITAENGTLFRENLLFTHRGLSGPAVLQISSYWQPGEFVTVNLLPDCDLDDFLNEQRSAHPNQSLKNTLAMQLPKRLVECLQQLGQIPDVTLKQLNVRDQLTLVETLTAWRVQPNGTEGYRTAEVTLGGVDTNELSSRTMEARKAPGLYFIGEVMDVTGWLGGYNFQWAWSSAWACAQALVEG

SEQ ID NO: 514 - protein, 397 aa, Klebsiella pneumoniae 1702/49; identical to SEQ ID NO: 509

SEQ ID NO: 515 - protein, 397 aa, Klebsiella pneumoniae i202/94
VERFDAIVVGAGAAGMFCAAQAGQLGCRVLLLDNGKKPGRKILMSGGGRCNFTNMYVEPAAYLSQNPHFCKSALARYTQWDFIELVGKYGIAWHEKTLGQLFCDDSAEQIVTLLLAECEKGGVQIRLRSEILSVERDEQGYRLQVNGETLATKKLVIASGGLSMPGLGASPFGYKIAEQFGLKVLPTRAGLVPFTLHKPLLEQLQVLSGVSVPSTITAENGTLFRENLLFTHRGLSGPAVLQISSYWQPGEFVTVNLLPDCNLEEFLNEQRGAHPNQSLKNTLAMQLPKRLVECLQQLGQIPDVTLKQLNVRDQQALVETLTAWRVQPNGTEGYRTAEVTLGGVDTNELSSRTMEARKAPGLYFIGEVMDVTGWLGGYNFQWAWSSAWACAQALVEG

SEQ ID NO: 516 - protein, 397 aa, Klebsiella pneumoniae 1996/49; identical to SEQ ID NO: 509

SEQ ID NO: 517 - protein, 397 aa, Klebsiella pneumoniae 1680/49; identical to SEQ ID NO: 509

SEQ ID NO: 518 - protein, 397 aa, Klebsiella pneumoniae 2002/49; identical to SEQ ID NO: 509

SEQ ID NO: 519 - protein, 397 aa, Klebsiella pneumoniae 6613
VVRIDAVVVGAGAAGMFCAAQAGQLGCRVLLLDNGRKPGRKILMSGGGRCNFTNMYVEPAAYLSQNPHFCKSALARYTQWDFIELVGKYGIAWHEKTLGQLFCDDSAEQIVNLLLAECEKGGVQIRLRSEILSVERDEQGYRLQVNGETLVTKKLVIASGGLSMPGLGASPFGYKVAEQFGLKVLPTRAGLVPFTLHKPLLEQLQVLSGVSVPSTITAENGTLFRENLLFTHRGLSGPAVLQISSYWQPGEFVTVNLLPDCDLDDFLNEQRSAHPNQSLKNTLAMQLPKRLVECLQQLGQIPDVTLKQLNVRDQQTLVETLTAWRVQPNGTEGYRTAEVTLGGVDTNELSSRTMEARKAPGLYFIGDMMDVTGWLGGYNFQWPWSSAWACAQALVEG

SEQ ID NO: 520 - protein, 397 aa, Klebsiella pneumoniae 5725y
VERFDAIVVGAGAAGMFCAAQAGQLGCRVLLLDNGKKPGRKILMSGGGRCNFTNMYVEPAAYLSQNPHFCKSALGRYTHWDFIELVGKYGIPRHEKTLRQLFCDDSAEQIVNLLLAECEKGGVQIRLRSEILLVERDEQGYRLQVNGETLMTKKLVIASGGLSMPGLGASPFGYKVAEQFGLKVLPTRAGLVPFTLHKPLLEQLQVLSGVTVPSTITAENGTLFRENLMFTHRGLSGTAGLQISSYWQPGEFVTVNLLTDCDLDDFLYEQRSAHPHQSLKKTLAMPLPKRLVERLQQLGQIPDVTLKQLNVPDQQTLVEKLTAWRVQPNGTEGYRTAEVTLGGVDTNELSSRTMEARKGPGLSFIGEVMDLTGWLGGYNFQWAWSSAWACAQALVEG

SEQ ID NO: 521 - protein, 397 aa, Klebsiella pneumoniae 7824; identical to SEQ ID NO: 507

SEQ ID NO: 522 - protein, 397 aa, Klebsiella pneumoniae 6258; identical to SEQ ID NO: 509

SEQ ID NO: 523 - protein, 397 aa, Klebsiella pneumoniae 6168; identical to SEQ ID NO: 509

SEQ ID NO: 524 - protein, 397 aa, Klebsiella pneumoniae i256/94; identical to SEQ ID NO: 509

SEQ ID NO: 525 - protein, 397 aa, Klebsiella pneumoniae 7749; identical to SEQ ID NO: 509

SEQ ID NO: 526 - protein, 397 aa, Klebsiella pneumoniae 2482
VERFDAIVVGAGAAGMFCAAQAGQLGCRVLLLDNGKKPGRKILMSGGGRCNFTNMYVEPAAYLSQNPHFCKSALARYTQWDFIELVGKYGIAWHEKTLGQLFCDDSAEQIVNLLLAECEKGGVEIRLRSEILSVERDEQGYRLQVNGETLVTKKLVIASGGLSMPGLGASPFGYKVAEQFGLKVLPTRAGLVPFTLHKPLLEQLQVLSGVSVPSTITAENGTLFRENLLFTHRGLSGPAVLQISSYWQPGEFVTVNLLPDCDLDDFLNEQRSAHPNQSLKNTLAMQLPKRLVECLQQLGQIPDVTLKQLNVRDQQTLVETLTAWRVQPNGTEGYRTAEVTLGGVDTNELSSRTMEARKAPGLYFIGEVMDVTGWLGGYNFQWAWSSAWACAQALVEG

SEQ ID NO: 527 - protein, 397 aa, Klebsiella pneumoniae 5281; identical to SEQ ID NO: 503

SEQ ID NO: 528 - protein, 397 aa, Klebsiella pneumoniae i224/94
VERFDAIVVGAGAAGMFCAAQAGQLGCRVLLLDNGKKPGRKILMSGGGRCNFTNMYVEPAAYLSQNPHFCKSALARYTQWDFIELVGKYGIAWHEKTLGQLFCDDSAEQIVNLLLAECEKGGVQIRLRSEILSVEHDEQGYRLQVNGETLMTKKLVIASGGLSMPGLGASPFGYKVAEQFGLKVLPTRAGLVPFTLHKPLLEQLQVLSGVSVPSTITAENGTLFRENLLFTHRGLSGPAVLQISSYWQPGEFVTVNLLPDCDLDDFLNEQRSAHPNQSLKNTLAMQLPKRLVECLQQLGQIPDVTLKQLNVRDQQTLVETLTAWRVQPNGTEGYRTAEVTLGGVDTNELSSRTMEARKAPGLYFIGEVMDVTGWLGGYNFQWAWSSAWACAQALVEG

SEQ ID NO: 529 - protein, 397 aa, Klebsiella pneumoniae 1756/51
VERFDAIVVGAGAAGMFCAAQAGQLGCRVLLLDNGKKPGRKILMSGGGRCNFTNMYVEPAAYLSQNPHFCKSALARYTQWDFIELVGKYGIAWHEKTLGQLFCDDSAEQIVNLLLAECEKGDVQIRLRSEILSVERDEQGYRLQVNGETLMTKKLVIASGGLSMPGLGASPFGYKVAEQFGLKVLPTRAGLVPFTLHKPLLEQLQVLSGVSVPSTITAENGTLFRENLLFTHRGLSGPAVLQISSYWQPGEFVTVNLLPDCNLEDFLNEQRSAHPNQSLKNTLAMQLPKRLVECLQQLGQIPDVTLKQLNVRDQQTLVETLTAWRVQPNGTEGYRTAEVTLGGVDTNELSSRTMEARKASGLYFIGEVMDVTGWLGGYNFQWAWSSAWACAQALVEG

SEQ ID NO: 530 - protein, 397 aa, Klebsiella pneumoniae Stanley; identical to SEQ ID NO: 529

SEQ ID NO: 531 - protein, 397 aa, Klebsiella pneumoniae 3985/51; identical to SEQ ID NO: 528

SEQ ID NO: 532 - protein, 397 aa, Klebsiella pneumoniae i221/94
VERFDAIVVGAGAAGMFCAAHAGQLGCRVLLLDNGKKPGRKILMSGGGRCNFTNMYVEPAAYLSQNPHFCKSALARYTQWDFIELVGKYGIAWHEKTLGQLFCDDSAEQIVNLLLAECEKGGVQIRLRSEILSVERDEQGYRLQVNGETLVTKKLVIASGGLSMPGLGASPFGYKVAEQFGLKVLPTRAGLVPFTLHKPLLEQLQVLSGVSVPSTITAENGTLFRENLLFTHRGLSGPAVLQISSYWQPGEFVTVNLLPDCDLDDFLNEQRSAHPNQSLKNTLAMQLPKRLVECLQQLGQIPDVTLKQLNVRDQQTLVETLTAWRVQPNGTEGYRTAEVTLGGVDTNELSSRTMEARKAPGLYFIGEVMDVTGWLGGYNFQWAWSSAWACAQALVEG

SEQ ID NO: 533 - protein, 397 aa, Klebsiella pneumoniae 4463/52
VERFDAIVIGAGAAGMFCAAQAGQLGCRVLLLDNGKKPGRKILMSGGGRCNFTNMYVEPAAYLSQNPHFCKSALARYTQWDFIELVGKYGIAWHEKTLGQLFCDDSAEQIVTLLLAECEKGGVQIRLRSEILSVERDEQGYRLQVNGETLATKKLVIASGGLSMPGLGASPFGYKIAEQFGLKVLPTRAGLVPFTLHKPLLEQLQVLSGVSVPSTITAENGTLFRENLLFTHRGLSGPAVLQISSYWQPGEFVTVNLLPDCNLEEFLNEQRGAHPNQSLKNTLAMQLPKRLVECLQQLGQIPDVTLKQLNVRDQQALVETLTAWRVQPNGTEGYRTAEVTLGGVDTNELSSRTMEARKAPGLFFIGEVMDVTGWLGGYNFQWAWSSAWACAQALVEG

SEQ ID NO: 534 - protein, 397 aa, Klebsiella pneumoniae 5710/52; identical to SEQ ID NO: 509

SEQ ID NO: 535 - protein, 397 aa, Klebsiella pneumoniae 5711/52
VERFDAIVVGAGAAGMFCAAQAGQLGCRVLLLDNGKKPGRKILMSGGGRCNFTNMYVEPAAYLSQNPHFCKSALARYTQWDFIELVGKYGIAWHEKTLGQLFCDDSAEQIVNLLLAECEKGGVQIRLRSEILSVERDEQGYRLQVNGETLMTKKLVIASGGLSMPGLGASPFGYKVAEQFGLKVLPTRAGLVPFTLHKPLLEQLQVLSGVSVPSTITAENGTLFRENLLFTHRGLSGPAVLQISSYWQPGEFVTVNLLPDCDLDDFLNEQRSAHPNQSLKNTLAMQLPKRLVECLQQLGQIPDVTLKQLNVRDQQTLVETLTAWRVQPNGTEGYRTAEVTLGGVDTNELSSRTMEARKAPGLYFIGEVMDVTGWLGGYNFQWAWSSAWACAQALVEG

SEQ ID NO: 536 - protein, 397 aa, Klebsiella pneumoniae 5845/52
VERFDAIVVGAGAAGMFCAAQAGQLGCHVLLLDNGKKPGRKILMSGGGRCNFTNMYVEPAAYLSQNPHFCKSALARYTQWDFIELVGKYGIAWHEKTLGQLFCDDSAEQIVNLLLAECEKGGVQIRLRSEILSVERDEQGYRLQVNGETLVTKKLVIASGGLSMPGLGASPFGYKVAEQFGLKVLPTRAGLVPFTLHKPLLEQLQVLSGVSVPSTITAENGTLFRENLLFTHRGLSGPAVLQISSYWQPGEFVTVNLLPDCDLDDFLNEQRSAHPNQSLKNTLAMQLPKRLVECLQQLGQIPDVTLKQLNVRDQQTLVETLTAWRVQPNGTEGYRTAEVTLGGVDTNELSSRTMEARKAPGLYFIGEVMDVTGWLGGYNFQWAWSSAWACAQALVEG

SEQ ID NO: 537 - protein, 397 aa, Klebsiella pneumoniae NCTC8172; identical to SEQ ID NO: 528

SEQ ID NO: 538 - protein, 397 aa, Klebsiella pneumoniae 708; identical to SEQ ID NO: 509

SEQ ID NO: 539 - protein, 397 aa, Klebsiella pneumoniae 370; identical to SEQ ID NO: 509

SEQ ID NO: 540 - protein, 397 aa, Klebsiella pneumoniae 5053
VERFDAIVVGAGAAGMFCAAHAGQLGCRVLLLDNGKKPGRKILMSGGGRCNFTNMYVEPAAYLSQNPHFCKSALARYTQWDFIELVGKYGIAWHEKTLGQLFCDDSAEQIVNLLLAECEKGGVQIRLRSEILSVERDEQGYRLQVNGETLVTKKLVIASGGLSMPGLGASPFGYKVAEQFGLKVLPTRAGLVPFTLHKPLLEQLQVLSGVSVPSTITAENGTLFRENLLFTHRGLSGPAVLQISSYWQPGEFVTVNLLPDCDLDDFLNEQRSAHPNQSLKNTLAMQLPKRLVECLQQLGQIPDVTLKQLNVRDQQTLVETLTAWRVQPNGTEGYRTAEVTLGGVDTNELSSRTMEARKAPGLYFIGEMMDVTGWLGGYNFQWAWSSAWACAQALVEG

SEQ ID NO: 541 - protein, 847 aa, Klebsiella pneumoniae MGH78578; identical to SEQ ID NO: 240

SEQ ID NO: 542 - protein, 847 aa, Klebsiella pneumoniae A5054
MSKVRIAIIGNGMVGHRFIEELLDKAPAGQFDITVFCEEPRIAYDRVHLSSYFSHHTAEELSLVREGFYEKHGVKVLVGERAITINRQEKVIHSSAGRTVFYDKLIMATGSYPWIPPIKGAETQDCFVYRTIEDLNAIESCARRSKRGAVVGGGLLGLEAAGALKNLGVETHVIEFAPMLMAEQLDQMGGEQLRRKIESMGVKVHTSKNTKEIVQQGTEARKTMHFADGSELQVDFIVFSTGIRPRDKLATQCGLAVAQRGGIMVNDSCQTSDPDIYAIGECASWNNRVYGLVAPGYKMAQVAVDHLLGSENSFTGADLSAKLKLLGVDVGGIGDAHGRTPGARSYVYLDESKEVYKRLIVSADNKTLLGAVLVGDTSDYGNLLQLVLNAIELPENPDSLILPAHAGSGKPSIGVDKLPDSAQICSCFDVSKGDLIAAINKGCHTVAALKAETKAGTGCGGCIPLVTQVLNAELAKQGIEVNNNLCEHFAYSRQELFHLIRVEGIKTFDELLEKHGQGYGCEVCKPTVGSLLASCWNEYILKPQHTPLQDSNDNFLANIQKDGTYSVIPRSAGGEITPEGLVAVGRIAREFNLYTKITGSQRIGLFGAQKDDLPEIWRQLIEAGFETGHAYAKALRMAKTCVGSTWCRYGVGDSVGFGVELENRYKGIRTPHKMKFGVSGCTRECAEAQGKDVGIIATEKGWNLYVCGNGGMKPRHADLLAADLDRDTLIKYLDRFMMFYIRTADKLTRTAPWLDNMEGGIDYLRSVIIDDKLGLNDHLEEELARLRAAFACEWTETVNNPATQTRFKHFINSDQRDPNVQVVPERDQHRPATPYERIPVTLVEEKA

SEQ ID NO: 543 - protein, 847 aa, Klebsiella pneumoniae B5055
MSKVRIAIIGNGMVGHRFIEELLDKAPAGQFDITVFCEEPRIAYDRVHLSSYFSHHTAEELSLVREGFYEKHGVKVLVGERAITINRQEKVIHSSAGRTVFYDKLIMATGSYPWIPPIKGAETQDCFVYRTIEDLNAIESCARRSKRGAVVGGGLLGLEAAGALKNLGVETHVIEFAPMLMAEQLDQMGGEQLRRKIESMGVKVHTSKNTKEIVQQGTEARKTMHFADGSELQVDFIVFSTGIRPRDKLATQCGLAVAQRGGIMVNDSCQTSDPDIYAIGECASWNNRVYGLVAPGYKMAQVAVDHLLGSENSFTGADLSAKLKLLGVDVGGIGDAHGRTPGARSYVYLDESKEVYKRLIVSADNKTLLGAVLVGDTSDYGNLLQLVLNAIELPENPDSLILPAHAGSGKPSIGVDKLPDSAQICSCFDVSKGDLIAAINKGCHTVAALKAETKAGTGCGGCIPLVTQVLNAELAKQGIEVNNNLCEHFAYSRQELFHLIRVEGIKTFDELLEKHGQGYGCEVCKPTVGSLLASCWNEYILKPQHTPLQDSNDNFLANIQKDGTYSVIPRSAGGEITPEGLVAVGRIAREFNLYTKITGSQRIGLFGAQKDDLPEIWRQLIEAGFETGHAYAKALRMAKTCVGSTWCRYGVGDSVGFGVELENRYKGIRTPHKMKFGVSGCTRECAEAQGKDVGIIATEKGWNLYVCGNGGMKPRHADLLAADLDRDTLIKYLDRFMMFYIRTADKLTRTAPWLDNMEGGIDYLRSVIIDDKLGLNDHLEEELARLRAAFACEWTETVNNPAAQTRFKHFINSDQRDPNVQVVPERDQHRPATPYERIPVTLVEEKA

SEQ ID NO: 544 - protein, 847 aa, Klebsiella pneumoniae i225/94; identical to SEQ ID NO: 240

SEQ ID NO: 545 - protein, 847 aa, Klebsiella pneumoniae D5050
MSKVRIAIIGNGMVGHRFIEELLDKAPAGQFDITVFCEEPRIAYDRVHLSSYFSHHTAEELSLVREGFYEKHGVKVLVGERAITINRQEKVIHSSAGRTVFYDKLIMATGSYPWIPPIKGAETQDCFVYRTIEDLNAIESCARRSKRGAVVGGGLLGLEAAGALKNLGVETHVIEFAPMLMAEQLDQMGGEQLRRKIESMGVKVHTSKNTKEIVQQGTEARKTMHFADGSELQVDFIVFSTGIRPRDKLATQCELAVAQRGGIMVNDSCQTSDPDIYAIGECASWNNRVYGLVAPGYKMAQVAVDHLLGSENSFTGADLSAKLKLLGVDVGGIGDAHGRTPGARSYVYLDESKEVYKRLIVSADNKTLLGAVLVGDTSDYGNLLQLVLNAIELPENPDSLILPAHAGSGKPSIGVDKLPDSAQICSCFDVSKGDLIAAINKGCHTVAALKAETKAGTGCGGCIPLVTQVLNAELAKQGIEVNNNLCEHFAYSRQELFHLIRVEGIKTFDELLEKHGQGYGCEVCKPTVGSLLASCWNEYILKPQHTPLQDSNDNFLANIQKDGTYSVIPRSAGGEITPEGLVAVGRIAREFNLYTKITGSQRIGLFGAQKDDLPKIWRQLIEAGFETGHAYAKALRMAKTCVGSTWCRYGVGDSVGFGVELENRYKGIRTPHKMKFGVSGCTRECAEAQGKDVGIIATEKGWNLYVCGNGGMKPRHADLLAADLDRDTLIKYLDRFMMFYIRTADKLTRTAPWLDNMEGGIDYLRSVIIDDKLGLNDHLEEELARLRAAFACEWTETVNNPAAQTRFKHFINSDQRDPNVQVVPERDQHRPATPYERIPVTLVEEKA

SEQ ID NO: 546 - protein, 847 aa, Klebsiella pneumoniae E5051; identical to SEQ ID NO: 545

SEQ ID NO: 547 - protein, 847 aa, Klebsiella pneumoniae Aerogenes4140
MSKVRIAIIGNGMVGHRFIEELLDKAPAGQFDITVFCEEPRIAYDRVHLSSYFSHHTAEELSLVREGFYEKHGVKVLVGERAITINRQEKVIHSSAGRTVFYDKLIMATGSYPWIPPIKGAETQDCFVYRTIEDLNAIESCARRSKRGAVVGGGLLGLEAAGALKNLGVETHVIEFAPMLMAEQLDQMGGEQLRRKIESMGVKVHTSKNTKEIVQQGTEARKTMHFADGSELQVDFIVFSTGIRPRDKLATQCGLAVAQRGGIMVNDSCQTSDPDIYAIGECASWNNRVYGLVAPGYKMAQVAVDHLLGSENSFTGADLSAKLKLLGVDVGGIGDAHGRTPGARSYVYLDESKEVYKRLIVSADNKTLLGAVLVGDTSDYGNLLQLVLNAIELPENPDSLILPAHAGSGKPSIGVDKLPDSAQICSCFDVSKGDLIAAINKGCHTVAALKAETKAGTGCGGCIPLVTQVLNAELAKQGIEVNNNLCEHFAYSRQELFHLIRVEGIKTFDELLEKHGQGYGCEVCKPTVGSLLASCWNEYILKPQHTPLQDSNDNFLANIQKDGTYSVIPRSAGGEITPEGLVAVGRIAREFNLYTKITGSQRIGLFGAQKDDLPEIWRQLIEAGFETGHAYAKALRMAKTCVGSTWCRYGVGDSVGFGVELENRYKGIRTPHKMKFGVSGCTRECAEAQGKDVGIIATEKGWNLYVCGNGGMKPRHADLLAADLDRETLIKYLDRFMMFYIRTADKLTRTAPWLDNMEGGIDYLRSVIIDDKLGLNDHLEEELARLRAAFACEWTETVNNPAAQTRFKHFINSDQRDPNVQVVPERDQHRPATPYERIPVTLVEKKA

SEQ ID NO: 548 - protein, 847 aa, Klebsiella pneumoniae 1015; identical to SEQ ID NO: 543

SEQ ID NO: 549 - protein, 847 aa, Klebsiella pneumoniae 919; identical to SEQ ID NO: 543

SEQ ID NO: 550 - protein, 847 aa, Klebsiella pneumoniae 313; identical to SEQ ID NO: 543

SEQ ID NO: 551 - protein, 847 aa, Klebsiella pneumoniae 1470
MSKVRIAIIGNGMVGHRFIEELLDKAPAGQFDITVFCEEPRIAYDRVHLSSYFSHHTAEELSLVREGFYEKHGVKVLVGERAITINRQEKVIHSSAGRTVFYDKLIMATGSYPWIPPIKGAETQDCFVYRTIEDLNAIESCARRSKRGAVVGGGLLGLEAAGALKNLGVETHVIEFAPMLMAEQLDQMGGEQLRRKIESMGVKVHTSKNTKEIVQQGTEARKTMHFADGSELQVDFIVFSTGIRPRDKLATQCGLAVAQRGGIMVNDSCQTSDPDIYAIGECASWNNRVYGLVAPGYKMAQVAVDHLLGSENSFTGADLSAKLKLLGVDVGGIGDAHGRTPGARSYVYLDESKEVYKRLIVSAHNKTLLGAVLVGDTSDYGNLLQLVLNAIELPENPDSLILPAHAGSGKPSIGVDKLPDSAQICSCFDVSKGDLIAAINKGCHTVAALKAETKAGTGCGGCIPLVTQVLNAELAKQGIEVNNNLCEHFAYSRQELFHLIRVEGIKTFDELLEKHGQGYGCEVCKPTVGSLLASCWNEYILKPQHTPLQDSNDNFLANIQKDGTYSVIPRSAGGEITPEGLVAVGRIAREFNLYTKITGSQRIGLFGAQKDDLPEIWRQLIEAGFETGHAYAKALRMAKTCVGSTWCRYGVGDSVGFGVELENRYKGIRTPHKMKFGVSGCTRECAEAQGKDVGIIATEKGWNLYVCGNGGMKPRHADLLAADLDRDTLIKYLDRFMMFYIRTADKLTRTAPWLDNMEGGIDYLRSVIIDDKLGLNDHLEEELARLRAAFACEWTETVNNPAAQTRFKHFINSDQRDPNVQVVPERDQHRPATPYERIPVTLVEEKA

SEQ ID NO: 552 - protein, 847 aa, Klebsiella pneumoniae 1193
MSKVRIAIIGNGMVGHRFIEELLDKAPAGQFDITVFCEEPRIAYDRVHLSSYFSHHTAEELSLVREGFYEKHGVKVLVGERAITINRQEKVIHSSAGRTVFYDKLIMATGSYPWIPPIKGAETQDCFVYRTIEDLNAIESCARRSKRGAVVGGGLLGLEAAGALKNLGVETHVIEFAPMLMAEQLDQMGGEQLRRKIESMGVKVHTSKNTKEIVQQGTEARKTMHFADGSELQVDFIVFSTGIRPRDKLATQCGLAVAQRGGIMVNDSCQTSDPDIYAIGECASWNNRVYGLVAPGYKTAQVAVDHLLGSENSFTGADLSAKLKLLGVDVGGIGDAHGRTPGARSYVYLDESKEVYKRLIVSADNKTLLGAVLVGDTSDYGNLLQLVLNAIELPENPDSLILPAHAGSGKPSIGVDKLPDSAQICSCFDVSKGDLIAAINKGCHTVAALKAETKAGTGCGGCIPLVTQVLNAELAKQGIEVNNNLCEHFAYSRQELFHLIRVEGIKTFDELLEKHGQGYGCEVCKPTVGSLLASCWNEYILKPQHTPLQDSNDNFLANIQKDGTYSVIPRSAGGEITPEGLVAVGRIAREFNLYTKITGSQRIGLFGAQKDDLPEIWRQLIEAGFETGHAYAKALRMAKTCVGSTWCRYGVGDSVGFGVELENRYKGIRTPHKMKFGVSGCTRECAEAQGKDVGIIATEKGWNLYVCGNGGMKPRHADLLAADLDRETLIKYLDRFMMFYIRTADKLTRTAPWLDNMEGGIDYLRSVIIDDKLGLNDHLEEELARLRAAFACEWTETVNNPAAQTRFKHFINSDQRDPNVQVVPERDQHRPATPYERIPVTLVEEKA

SEQ ID NO: 553 - protein, 847 aa, Klebsiella pneumoniae Mich61; identical to SEQ ID NO: 543

SEQ ID NO: 554 - protein, 847 aa, Klebsiella pneumoniae 2069/49; identical to SEQ ID NO: 543

SEQ ID NO: 555 - protein, 847 aa, Klebsiella pneumoniae i243/94
MSKVRIAIIGNGMVGHRFIEELLDKAPAGQFDITVFCEEPRIAYDRVHLSSYFSHHTAEELSLVREGFYEKHGVKVLVGERAITINRQEKVIHSSAGRTVFYDKLIMATGSYPWIPPIKGAETQDCFVYRTIEDLNAIESCARRSKRGAVVGGGLLGLEAAGALKNLGVETHVIEFAPMLMAEQLDQMGGEQLRRKIESMGVKVHTSKNTKEIVQQGTEARKTMHFADGSELQVDFIVFSTGIRPRDKLATQCGLAVAQRGGIMVNDSCQTSDPDIYAIGECASWNNRVYGLVAPGYKMAQVAVDHLLGSENSFTGADLSAKLKLLGVDVGGIGDAHGRTPGARSYVYLDESKEVYKRLIVSADNKTLLGAVLVGDTSDYGNLLQLVLNAIELPENPDSLILPAHAGSGKPSIGVDKLPDSAQICSCFDVSKGDLIAAINKGCHTVAALKAETKAGTGCGGCIPLVTQVLNAELAKQGIEVNNNLCEHFAYSRQELFHLIRVEGIKTFDELLEKHGQGYGCEICKPTVGSLLASCWNEYILKPQHTPLQDTNDNFLANIQKDGTYSVIPRSAGGEITPEGLVAVGRIAREFNLYTKITGSQRIGLFGAQKDDLPEIWRQLIEAGFETGHAYAKALRMAKTCVGSTWCRYGVGDSVGFGVELENRYKGIRTPHKMKFGVSGCTRECAEAQGKDVGIIATEKGWNLYVCGNGGMKPRHADLLAADLDRETLIKYLDRFMMFYIRTADKLTRTAPWLDNMEGGIDYLRSVIIDDKLGLNDHLEEELARLRAAFACEWTETVNNPAAQTRFKHFINSDQRDPNVQVVPERDQHRPATPYERIPVTLVEENV

SEQ ID NO: 556 - protein, 847 aa, Klebsiella pneumoniae 2005/49
MSKVRIAIIGNGMVGHRFIEELLDKAPAGQFDITVFCEEPRIAYDRVHLSSYFSHHTAEELSLVREGFYEKHGVKVLVGERAITINRQEKVIHSSAGRTVFYDKLIMATGSYPWIPPIKGAETQDCFVYRTIEDLNAIESCARRSKRGAVVGGGLLGLEAAGALKNLGVETHVIEFAPMLMAEQLDQMGGEQLRRKIESMGVKVHTSKNTKEVVQQGTEARKTMHFADGSELQVDFIVFSTGIRPRDKLATQCGLAVAQRGGIMVNDSCQTSDPDIYAIGECASWNNRVYGLVAPGYKMAQVAVDHLLGSENSFTGADLSAKLKLLGVDVGGIGDAHGRTPGARSYVYLDESKEVYKRLIVSADNKTLLGAVLVGDTSDYGNLLQLVLNAIELPENPDSLILPAHAGSGKPSIGVDKLPDSAQICSCFDVSKGDLIAAINKGCHTVAALKAETKAGTGCGGCIPLVTQVLNAELAKQGIEVNNNLCEHFAYSRQELFHLIRVEGIKTFDELLEKHGQGYGCEVCKPTVGSLLASCWNEYILKPQHTPLQDSNDNFLANIQKDGTYSVIPRSAGGEITPEGLVAVGRIAREFNLYTKITGSQRIGLFGAQKDDLPEIWRQLIEAGFETGHAYAKALRMAKTCVGSTWCRYGVGDSVGFGVELENRYKGIRTPHKMKFGVSGCTRECAEAQGKDVGIIATEKGWNLYVCGNGGMKPRHADLLAADLDRDTLIKYLDRFMMFYIRTADKLTRTAPWLDNMEGGIDYLRSVIIDDKLGLNDHLEEELARLRAAFACEWTETVNNPAAQTRFKHFINSDQRDPNVQVVPERDQHRPATPYERIPVTLVEEKA

SEQ ID NO: 557 - protein, 847 aa, Klebsiella pneumoniae 1754/49; identical to SEQ ID NO: 543

SEQ ID NO: 558 - protein, 847 aa, Klebsiella pneumoniae 1702/49; identical to SEQ ID NO: 240

SEQ ID NO: 559 - protein, 847 aa, Klebsiella pneumoniae i202/94
MSKVRIAIIGNGMVGHRFIEELLDKAPAGQFDITVFCEEPRIAYDRVHLSSYFSHHTAEELSLVREGFYEKHGVKVLVGERAITINRQEKVIHSSAGRTVFYDKLIMATGSYPWIPPIKGAETQDCFVYRTIEDLNAIESCARRSKRGAVVGGGLLGLEAAGALKNLGVETHVIEFAPMLMAEQLDQMGGEQLRRKIESMGVKVHTSKNTKEIVQQGIEARKTMRFADGSELQVDFIVFSTGIRPRDKLATQCGLAVAQRGGIMVNDSCQTSDPDIYAIGECASWNNRVYGLVAPGYKMAQVAVDHLLGSENSFTGADLSAKLKLLGVDVGGIGDAHGRTPGARSYVYLDESKEVYKRLIVSADNKTLLGAVLVGDTSDYGNLLQLVLNAIELPENPDSLILPAHAGSGKPSIGVDKLPDSAQICSCFDVSKGDLIAAINKGCHTVAALKAETKAGTGCGGCIPLVTQVLNAELAKQGIEVNNNLCEHFAYSRQELFHLIRVEGIKTFDELLAKHGQGYGCEVCKPTVGSLLASCWNEYILKPQHTPLQDTNDNFLANIQKDGTYSVIPRSAGGEITPEGLVAVGRIAREFNLYTKITGSQRIGLFGAQKDDLPEIWRQLIEAGFETGHAYAKALRMAKTCVGSTWCRYGVGDSVGFGVELENRYKGIRTPHKMKFGVSGCTRECAEAQGKDVGIIATEKGWNLYVCGNGGMKPRHADLLAADLDRETLITYLDRFMMFYIRTADKLTRTAPWLDNMEGGIDYLRSVIIDDKLGLNDHLEEELARLRAAFACEWTETVNNPAAQTRFKHFINSDQRDPNVQVVPERDQHRPATPYERIPVTLVEEKA

SEQ ID NO: 560 - protein, 847 aa, Klebsiella pneumoniae 1996/49; identical to SEQ ID NO: 543

SEQ ID NO: 561 - protein, 847 aa, Klebsiella pneumoniae 1680/49
MSKVRIAIIGNGMVGHRFIEELLDKAPAGQFDITVFCEEPRIAYDRVHLSSYFSHHTAEELSLVREGFYEKHGVKVLVGERAITINRQEKVIHSSAGRTVFYDKLIMATGSYPWIPPIKGAETQDCFVYRTIEDLNAIESCARRSKRGAVVGGGLLGLEAAGALKNLGVETHVIEFAPMLMAEQLDQMGGEQLRRKIESMGVKVHTSKNTKEIVQQGTEARKTMHFADGSELQVDFIVFSTGIRPRDKLATQCGLAVAQRGGIMVNDSCQTSDPDIYAIGECASWNNRVYGLVAPGYKMAQVAVDHLLGSENSFTGADLSAKLKLLGVDVGGIGDAHGRTPGARSYVYLDESKEVYKRLIVSADNKTLLGAVLVGDTSDYGNLLQLVLNAIELPENPDSLILPAHAGSGKPSIGVDKLPDSAQICSCFDVSKGDLIAAINKGCHTVAALKAETKAGTGCGGCIPLVTQVLNAELAKQGIEVNNNLCEHFAYSRQELFHLIRVEGIKTFGELLEKHGQGYGCEVCKPTVGSLLASCWNEYILKPQHTPLQDSNDNFLANIQKDGTYSVIPRSAGGEITPEGLVAVGRIAREFNLYTKITGSQRIGLFGAQKDDLPEIWQQLIEAGFETGHAYAKALRMAKTCVGSTWCRYGVGDSVGFGVELENRYKGIRTPHKMKFGVSGCTRECAEAQGKDVGIIATEKGWNLYVCGNGGMKPRHADLLAADLDRDTLIKYLDRFMMFYIRTADKLTRTAPWLDNMEGGIDYLRSVIIDDKLGLNDHLEEELARLRAAFAWEWTETVNNPAAQTRFKHFINSDQRDPNVQVVPERDQHRPATPYERIPVTLVEEKA

SEQ ID NO: 562 - protein, 847 aa, Klebsiella pneumoniae 2002/49; identical to SEQ ID NO: 543

SEQ ID NO: 563 - protein, 847 aa, Klebsiella pneumoniae 6613; identical to SEQ ID NO: 543

SEQ ID NO: 564 - protein, 847 aa, Klebsiella pneumoniae 5758; identical to SEQ ID NO: 543

SEQ ID NO: 565 - protein, 847 aa, Klebsiella pneumoniae 6258; identical to SEQ ID NO: 543

SEQ ID NO: 566 - protein, 847 aa, Klebsiella pneumoniae 6168; identical to SEQ ID NO: 543

SEQ ID NO: 567 - protein, 847 aa, Klebsiella pneumoniae i256/94; identical to SEQ ID NO: 543

SEQ ID NO: 568 - protein, 847 aa, Klebsiella pneumoniae 7749
MSKVRIAIIGNGMVGHRFIEELLDKAPAGQFDITVFCEEPRIAYDRVHLSSYFSHHTAEELSLVREGFYEKHGVKVLVGERAITINRQEKVIHSSAGRTVFYDKLIMATGSYPWIPPIKGAETQDCFVYRTIEDLNAIESCARRSKRGAVVGGGLLGLEAAGALKNLGVETHVIEFAPMLMAEQLDQMGGEQLRRKIESMGVKVHTSKNTKEIVQQGTEARKTMHFADGSELQVDFIVFSTGIRPRDKLATQCGLAVAQRGGIMVNDSCQTSDPDIYAIGECASWNNRVYGLVAPGYKMAQVAVDHLLGSENSFTGADLSAKLKLLGVDVGGIGDAHGRTPGARSYVYLDESKEVYKRLIVSADNKTLLGAVLVGDTSDYGNLLQLVLNAIELPENPDSLILPAHAGSGKPSIGVDKLPDSAQICSCFDVSKGDLIAAINKGCHTVAALKAETKAGTGCGGCIPLVTQVLNAELAKQGIEVNNNLCEHFAYSRQELFHLIRVEGIKTFDELLEKHGQGYGCEVCKPTVGSLLASCWNEYILKPQHTPLQDSNDNFLANIQKDGTYSVIPRSAGGEITPEGLVAVGRIAREFNLYTKITGSQRIGLFGAQKDDLPEIWRQLIEAGFETGHAYAKALRMAKTCVGSTWCRYGVGDSVGFGVELENRYKGIRTPHKMKFGVSGCTRECAEAQGKDVGIIATEKGWNLYVCGNGGMKPRHADLLAADLDRETLIKYLDRFMMFYIRTADKLTRTAPWLDNMEGGIDYLRSVIIDDKLGLNDHLEEELARLRAAFACEWTETVNNPAAQTRFKHFINSDQRDPNVQVVPERNQHRPATPYERIPVTLVEEKA

SEQ ID NO: 569 - protein, 847 aa, Klebsiella pneumoniae i224/94; identical to SEQ ID NO: 543

SEQ ID NO: 570 - protein, 847 aa, Klebsiella pneumoniae 1756/51; identical to SEQ ID NO: 555

SEQ ID NO: 571 - protein, 847 aa, Klebsiella pneumoniae 3985/51; identical to SEQ ID NO: 240

SEQ ID NO: 572 - protein, 847 aa, Klebsiella pneumoniae i221/94; identical to SEQ ID NO: 543

SEQ ID NO: 573 - protein, 847 aa, Klebsiella pneumoniae 4463/52; identical to SEQ ID NO: 559

SEQ ID NO: 574 - protein, 847 aa, Klebsiella pneumoniae 5710/52; identical to SEQ ID NO: 543

SEQ ID NO: 575 - protein, 847 aa, Klebsiella pneumoniae 5711/52; identical to SEQ ID NO: 543

SEQ ID NO: 576 - protein, 847 aa, Klebsiella pneumoniae NCTC8172
MSKVRIAIIGNGMVGHRFIEELLDKAPAGQFDITVFCEEPRIAYDRVHLSSYFSHHTAEELSLVREGFYEKHGVKVLVGERAITINRQEKVIHSSAGRTVFYDKLIMATGSYPWIPPIKGAETQDCFVYRTIEDLNAIESCARRSKRGAVVGGGLLGLEAAGALKNLGVETHVIEFAPMLMAEQLDQMGGEQLRRKIESMGVKVHTSKNTKEIVQQGTEARKTMHFADGSELQVDFIVFSTGIRPRDKLATQCGLAVAQRGGIMVNDSCQTSDPDIYAIGECASWNNRVYGLVAPGYKMAQVAVDHLLGSENSFTGADLSAKLKLLGVDVGGIGDAHGRTPGARSYVYLDESKEVYKRLIVSATNKTLLGAVLVGDTSDYGNLLQLVLNAIELPENPDSLILPAHAGSGKPSIGVDKLPDSAQICSCFDVSKGDLIAAINKGCHTVAALKAETKAGTGCGGCIPLVTQVLNAELAKQGIEVNNNLCEHFAYSRQELFHLIRVEGIKTFDELLEKHGQGYGCEVCKPTVGSLLASCWNEYILKPQHTPLQDSNDNFLANIQKDGTYSVIPRSAGGEITPEGLVAVGRIAREFNLYTKITGSQRIGLFGAQKDDLPEIWRQLIEAGFETGHAYAKALRMAKTCVGSTWCRYGVGDSVGFGVELENRYKGIRTPHKMKFGVSGCTRECAEAQGKDVGIIATEKGWNLYVCGNGGMKPRHADLLAADLDRETLIKYLDRFMMFYIRTADKLTRTAPWLDNMEGGIDYLRSVIIDDKLGLNDHLEEELARLRAAFACEWTETVNNPAAQTRFKHFINSDQRDPNVQVVPERDQHRPATPYERIPVTLVEEKA

SEQ ID NO: 577 - protein, 847 aa, Klebsiella pneumoniae 370; identical to SEQ ID NO: 543

SEQ ID NO: 578 - protein, 847 aa, Klebsiella pneumoniae Friedlaender204; identical to SEQ ID NO: 543

SEQ ID NO: 579 - protein, 847 aa, Klebsiella pneumoniae 5053; identical to SEQ ID NO: 543

SEQ ID NO: 580 - protein, 1663 aa, Klebsiella pneumoniae MGH78578; identical to SEQ ID NO: 241

SEQ ID NO: 581 - protein, 1254 aa, Klebsiella pneumoniae A5054
VTNSIRLIGRGVRRMKPFRLAALSLALLTAFSLTGCDDSGTPQASAPAPAADSNPGATAKPDRAQLAALAEKSQGKALTLLDASEVQLDGAATLVLTFSVPLQPDQDFSRSVHLVDKKSGKVDGAWELAPNLKELRLRHLEPKRELIVSVDPTLTALNKATLDKPFEKTLTTRDIAPSVGFASRGSLLPGNVVAGLPVMALNVDNVDVNFFRIKPESLSAFVSQWEYRNSLSNWESDELLKMADLVYSGRFDLNPARNTREKLLLPLSDIKPLQQPGVYVAVMNPAGRYSYSNAATLFTLSDIGVSAHRYHNRLDVFTQSLENGAAQSGIEVQLLNAKGQTLAEAKSDSQGHVTLQTDKEAALLLARKEGQTTLLDLKLPALDLAEFSIAGAPGFSKQFFMFGPRDLYRPGETVILNALLRDSDGKPLAEQPVKLEVVQPDGQVIRSVMSKPVNGLYQFTYPLDSGAATGMWHIRASAGDNQPREWDFHVEDFMPERMALNLTPQAAPVAPDADVTFGVSGAYLYGAPASGNQLQGKLFLRPLRDAVAALPGFQFGDIAEENLSRSLDEVQLTLDEKGHGEVTTSSQWQDSHSPLQVVLQASLLESGGRPVTRTVKQPIWPAEALPGIRPQFTLKDVYDYRTDTTVKQPVVDENSNAAFDIVYADVKGEKKAFSGLQVRLIRERRDYYWNWSDSEGWQSQFDQKDLQEGEESLDLQAGQIGKVSFPVEWGSYRLEVKGPDDVVSSVRFWAGYSWQDNSEGAGAARPDRVTMKLDKPSYKPGDTIRLHIAAPAAGKGYAMVESSEGPLWWQEIDVPAEGMDLSIPVDKTWNRHDLYLSTLVVRPGDKSRSATPKRAVGLLHLPLGDENRRLTLALEAPDKMRPNQPLTVKVKASVKEGDAPKQVNVLLSAVDSGVLNITDYATPDPWNAFFGQKRYGADIYDIYGQVIEGQGRVASLRFGGDGDELKRGGKPPVNHVTIVAQQAQPVVLNDQGEGTVTLPIGDFNGELRVMAQAWTADDFGSSEDKVVVAAPVIAELNTPRFLASGDTTRLALDLSNLTDKPQTLQVHLTASGLVTLTDGQLPPVQLAPGARSTLFIPVSALAGFGDGQVNATISGLSLPGETFAPLQKQWKIGVRPAYPAQTVNSGAVLQPGESWQPPAAQSQGFAPQTLQGQLLLSGKPPLNLARYIRELKAYPYGCLEQTASGLFPSLYTSAAQLKALGISGDSDEKRRAAIDVGISRLLQMQLENGGFALW

SEQ ID NO: 582 - protein, 951 aa, Klebsiella pneumoniae i252/94
VIICIRPTGRGVRRMKPFRLAALSLALLTAFSLTGCDDSGTPQATAPAPAADSNPGATAKPDRVQLAALAEKSQGKALTLIDASEVQLDGAATLVLTFSVPLQPDQDFSRSVHLVDKKSGKVDGAWELAPNLKELRLRHLEPKRELIVSVDPTLTALNKATLDKPFEKTLTTRDIAPSVGFASRGSLLPGNVVAGLPVMALNVDNVDVNFFRIKPESLSAFVSQWEYRNSLSNWESDELLKMADLVYTGRFDLNPARNTREKLLLPLNDIKPLQQPGVYVAVMNPAGHYSYSNAATLFTLSDIGVSAHRYHNRLDVFTQSLENGAAQSGIDVQLLNAKGQTLAEAKSDSQGHVTLQTDKEAALLLARKEGQTTLLDLKLPALDLAEFSIAGAPGFSKQFFMFGPRDLYRPGETVILNALLRDSDGKPLAEQPVKLEVVQPDGQVIRSVMSKPVNGLYQFTYPLDSGAATGMWHIRASAGDNQPREWDFHVEDFMPERMALNLTPQAAPVAPDADVTFGVSGAYLYGAPASGNQLQGKLFLRPLRDAVAALPGFQFGDIAEENLSRSLDEVQLTLDEKGHGEVTTSSQWQDSHSPLQVVLQASLLESGGRPVTRTVKQPIWPAEALPGIRPQFTLKDVYDYRTDTTVKQPVVDENSNAAFDIVYADAKGEKKAISGLQVRLIRERRDYYWNWSDSEGWQSQFDQKDLQEGEESLDLQAGQTGKVSFPVEWGSYRLEVKGPDDVVSSVRFWAGYSWQDNSEGTGAARPDRVTMKLDKPSYKPGDTIKLHIAAPAAGKGYAMVESSEGPLWWQEIDVPAEGMDLSIPVDKAWNRHDLYLSTLVVRPGDKSRSATPKRAVGLLHLPLGDENRRLTLALEAPDKMRPNQPLTVKVKASVKEGEAPKQVNVLLSAVDSGVLNITDYATPDPWNAFFGQKRYGADIYDIYGQVIEGQG

SEQ ID NO: 583 - protein, 1403 aa, Klebsiella pneumoniae B5055
VTNCIRLIGRGVRRMKPFRLAALSLALLTAFSLTGCDDSGTPQASAPAPAADSNPGATAKPDRAQLAALAEKSQGKALTLLDASEVQLDGAATLVLTFSVPLQPDQDFSRSVHLVDKKSGKVDGAWELAPNLKELRLRHLEPKRELIVSVDPTLTALNKATLDKPFEKTLTTRDIAPSVGFASRGSLLPGNVVAGLPVMALNVDNVDVNFFRIKPESLSAFVSQWEYRNSLSNWESDELLKMADLVYTGRFDLNPARNTREKLLLPLSDIKPLQQPGVYVAVMNPAGRYSYSNAATLFTLSDIGVSAHRYHNRLDVFTQSLENGAAQSGIEVQLLNAKGQTLAEAKSDSQGHVTLQTDKEAALLLARKEGQTTLLDLKLPALDLAEFSIAGAPGFSKQFFMFGPRDLYRPGETVILNALLRDSDGKPLAEQPVKLEVVQPDGQVIRSVMSKPVNGLYQFTYPLDSGAATGMWHIRASAGDNQPREWDFHVEDFMPERMALNLTPQAAPVAPDADVTFGVSGAYLYGAPASGNQLQGKLFLRPLRDAVAALPGFQFGDIAEENLSRSLDEVQLTLDEKGHGEVTTSSQWQDSHSPLQVVLQASLLESGGRPVTRTVKQPIWPAEALPGIRPQFTLKDVYDYRTDTTVKQPVVDENSNAAFDIVYADVKGEKKAISGLQVRLIRERRDYYWNWSDSEGWQSQFDQKDLQEGEESLDLQAGQIGKVSFPVEWGSYRLEVKGPDDVVSSVRFWAGYSWQDNSEGAGAARPDRVTMKLDKPSYKPGDTIRLHIAAPAAGKGYAMVESSEGPLWWQEIDVPAEGMDLSIPVDKTWNRHDLYLSTLVVRPGDKSRSATPKRAVGLLHLPLGDENRRLTLALEAPDKMRPNQPLTVKVKASVKEGEAPKQVNVLLSAVDSGVLNITDYATPDPWNAFFGQKRYGADIYDIYGQVIEGQGRVASLCFGGDGDELKRGGKPPVNHVTIVAQQAQPVVLNDQGEGTVTLPIGDFNGELRVMAQAWTADDFGSSEDKVVVAAPVIAELNTPRFLASGDTTRLALDLSNLTDKPQTLQVHLTASGLVTLTDGQLPPVQLAPGARSTLFIPVSALAGFGDGQVNATISGLSLPGETFAPLQKQWKIGVRPAYPAQTVNSGAVLQPGESWQPPAAQSQGFAPQTLQGQLLLSGKPPLNLARYIRELKAYPYGCLEQTASGLFPSLYTSAAQLKALGISGDSDEKRRAAIDVGISRLLQMQLENGGFALWDREGPEEYWLTAYAMDFLVRASEQGYSVPVNAINKGNERLLRYLQEPGLMTVRYSDDAQASRFAAQAYAALVLARQQKAPLGALREIWSRHDQARSGLPLLQLGIALKTMGDAPRGDAALKLAVATPRQDENRWLGDYGSPLRDNALKL

SEQ ID NO: 584 - protein, 1454 aa, Klebsiella pneumoniae i225/94
VTNCIRLIGRGVRRMKPFRLAALSLALLTAFSLTGCDDSGTPQASAPAPAADSNPGATAKPDRAQLAALAEKSQGKALTLLDASEVQLDGAATLVLTFSVPLQPDQDFSRSVHLVDKKSGKVDGAWELAPNLKELRLRHLEPKRELIVSVDPTLTALNKATLDKPFEKTLTTRDIAPSVGFASRGSLLPGNVVAGLPVMALNVDNVDVNFFRIKPESLSAFVSQWEYRNSLSNWESDELLKMADLVYTGRFDLNPARNTREKLLLPLSDIKPLQQPGVYVAVMNPAGRYSYSNAATLFTLSDIGVSAHRYHNRLDVFTQSLENGAAQSGIEVQLLNAKGQTLAEAKSDSQGHVTLQTDKEAALLLARKEGQTTLLDLKLPALDLAEFSIAGAPGFSKQFFMFGPRDLYRPGETVILNALLRDSDGKPLAEQPVKLEVVQPDGQVIRSVMSKPVNGLYQFTYPLDSGAATGMWHIRASAGDNQPREWDFHVEDFMPERMALNLTPQAAPVAPDADVTFGVSGAYLYGAPASGNQLQGKLFLRPLRDAVAALPGFQFGDIAEENLSRSLDEVQLTLDEKGHGEVTTSSQWQDSHSPLQVVLQASLLESGGRPVTRTVKQPIWPAEALPGIRPQFTLKDVYDYRTDTTVKQPVVDENSNAAFDIVYADVKGEKKAISGLQVRLIRERRDYYWNWSDSEGWQSQFDQKDLQEGEESLDLQAGQIGKVSFPVEWGSYRLEVKGPDDVVSSVRFWAGYSWQDNSEGAGAARPDRVTMKLDKPSYKPGDTIRLHIAAPAAGKGYAMVESSEGPLWWQEIDVPAEGMDLSIPVDKTWNRHDLYLSTLVVRPGDKSRSATPKRAVGLLHLPLGDENRRLTLALEAPDKIRPNQPLTVKVKASVKEGEAPKQVNVLLSAVDSGVLNITDYATPDPWNAFFGQKRYGADIYDIYGQVIEGQGRVASLRFGGDGDELKRGGKPPVNHVTIVAQQAQPVVLNDQGEGTVTLPIGDFNGELRVMAQAWTADDFGSSEDKVVVAAPVIAELNTPRFLASGDTTRLALDLSNLTDKPQTLQVHLTASGLVTLTEGQLPPVQLAPGARSTLFIPVSALTGFGDGQVNATISGLSLPGETFAPLQKQWKIGVRPAYPAQTVNSGAVLQPGESWQPPAAQSQGFAPQTLQGQLLLSGKPPLNLARYIRELKAYPYGCLEQTASGLFPSLYTSAAQLKALGISGDSDEKRRAAIDVGISRLLQMQLENGGFALWDREGPEEYWLTAYAMDFLVRASEQGYSVPVNAINKGNERLLRYLQEPGLMTVRYSDDAQASRFAAQAYAALVLARQQKAPLGALREIWSRHDQARSGLPLLQLGIALKTMGDAPRGDAALKLAVATPRQDENRWLGDYGSPLRDNALKLALLEENKLLPEVQNQLLSTLSEEAYGQRWLSTQETNALFLAGRTLADLPGS

SEQ ID NO: 585 - protein, 1492 aa, Klebsiella pneumoniae D5050
VTNSIRLIGRGVRRMKPFRLAALSLALLTAFSLTGCDDSGTPQASAPAPAADSNPGATAKPDRAQLAALAEKSQGKALTLLDASEVQLDGAATLVLTFSVPLQPDQDFSRSVHLVDKKSGKVDGAWELAPNLKELRLRHLEPKRELIVSVDPTLTALNKATLDKPFEKTLTTRDIAPSVGFASRGSLLPGNVVAGLPVMALNVDNVDVNFFRIRPESLSALVSQWEYRNSLSNWESDELLNMADLVYSGRFDLNPARHTREKLLLPLSDIKPLQQPGVYLAVMNPAGRYIYINAATLFTLIDIGVSAHRYHNRLDVFTHTLENGAAQSGIEVQLLNAKGQTLAEAKSDSQGHVTLQTDKKAALLLARKEGKTTLLDLKLPALDLAEFSIAGAPGFRKQFVMFGPRDPYRPGETVILNALLRDSDGKPLAEQPVKLEVVQPDGQVIRSVMSKPVNGLYQFTYPLDSGAATGMWHIRASAGDNQPREWDFYVEDFMPERMALNLTPQAAPVAPDADVTFGVSGAYLYGAPASGNQLQAKLFLRPLRDAVAALPGFQFGDIAEENLSRSLDEVQLTLDEKGHGEVTTSSQWQDSHSPLQVVLQASLLESGGRPVTRTVKQPIWPAEALPGIRPQFTLKDVYDYRTDTTVKQPVVDENSNAAFDIVYADVKGEKKAISGLQVRLIRERRDYYWNWSDSEGWQSQFDQKDLQEGEESLDLQAGQIGKVSFPVEWGSYRLEVKGPDDVVSSVRFWAGYSWQDNSEGAGAARPDRVTMKLDKPSYKPGDTIRLHIAAPAAGKGYAMVESSEGPLWWQEIDVPAEGMDLSIPVDKTWNRHDLYLSTLVVRPGDKSRSATPKRAVGLLHLPLGDENRRLTLALEAPDKMRPNQPLTVKVKASVKEGEAPKQVNVLLSAVDSGVLNITDYATPDPWNAFFGQKRYGADIYDIYGQVIEGQGRVASLRFGGDGDELKRGGKPPVNHVTIVAQQAQPVVLNDQGEGTVTLPIGDFNGELRVMAQAWTADDFGSSEDKVVVAAPVIAELNTPRFLASGDTTRLALDLSNLTDKPQTLQVHLTASGLVTLTDGQLPPVQLAPGARSTLFIPVSALAGFGDGQVNATISGLSLPGETFAPLQKQWKIGVRPAYPAQTVNSGAVLQPGESWQPPAAQSQGFAPQTLQGQLLLSGKPPLNLARYIRELKAYPYGCLEQTASGLFPSLYTSAAQLKALGISGDSDEKRRAAIDVGISRLLQMQLENGGFALWDREGPEEYWLTAYAMDFLVRASEQGYSVPVNAINKGNERLLRYLQEPGLMTVRYSDDAQASRFAAQAYAALVLARQQKAPLGALREIWSRHDQARSGLPLLQLGIALKTMGDAPRGDAALKLAVATPRQDENRWLGDYGSPLRDNALKLALLEENKLLPEVQTQLLSTLSEEAYGQRWLSTQETNALFLAGRTLADLPGSWQAQTSLQAEPLAGDKAQTRNLDGDRLAALQVSNTGSQ

SEQ ID NO: 586 - protein, 1463 aa, Klebsiella pneumoniae E5051
VTNSIRLIGRGVRRMKPFRLAALSLALLTAFSLTGCDDSGTPQASAPAPAADSNPGATAKPDRAQLAALAEKSQGKALTLLDASEVQLDGAATLVLTFSVPLQPDQDFSRSVHLVDKKSGKVDGAWELAPNLKELRLRHLEPKRELIVSVDPTLTALNKATLDKPFEKTLTTRDIAPSVGFASRGSLLPGNVVAGLPVMALNVDNVDVNFFRIKPESLSAFVSQWEYRNSLSNWESDELLKMADLVYSGRFDLNPARNTREKLLLPLSDIKPLQQPGVYVAVMNPAGRYSYSNAATLFTLSDIGVSAHRYHNRLDVFTQSLENGAAQSGIEVQLLNAKGQTLAEAKSDSQGHVTLQTDKEAALLLARKEGQTTLLDLKLPALDLAEFSIAGAPGFSKQFFMFGPRDLYRPGETVILNALLRDSDGKPLAEQPVKLEVVQPDGQVIRSVMSKPVNGLYQFTYPLDSGAATGMWHIRASAGDNQPREWDFHVEDFMPERMALNLTPQAAPVAPDADVTFGVSGAYLYGAPASGNQLQAKLFLRPLRDAVAALPGFQFGDIAEENLSRSLDEVQLTLDEKGHGEVTTSSQWQDSHSPLQVVLQASLLESGGRPVTRTVKQPIWPAEALPGIRPQFTLKDVYDYRTDTTVKQPVVDENSNAAFDIVYADVKGEKKAISGLQVRLIRERRDYYWNWSDSEGWQSQFDQKDLQEGEESLDLQAGQIGKVSFPVEWGSYRLEVKGPDDVVSSVRFWAGYSWQDNSEGAGAARPDRVTMKLDKPSYKPGDTIRLHIAAPAAGKGYAMVESSEGPLWWQEIDVPAEGMDLSIPVDKTWNRHDLYLSTLVVRPGDKSRSATPKRAVGLLHLPLGDENRRLTLALEAPDKMRPNQPLTVKVKASVKEGEAPKQVNVLLSAVDSGVLNITDYATPDPWNAFFGQKRYGADIYDIYGQVIEGQGRVASLRFGGDGDELKRGGKPPVNHVTIVAQQAQPVVLNDQGEGTVTLPIGDFNGELRVMAQAWTADDFGSSEDKVVVAAPVIAELNTPRFLASGDTTRLALDLSNLTDKPQPLQVHLTASGLVTLTDGQLPPVQLAPGARSTLFIPVSALAGFGDGQVNATISGLSLPGETFAPLQKQWKIGVRPAYPAQTVNSGAVLQPGESWQPPAAQSQGFAPQTLQGQLLLSGKPPLNLARYIRELKAYPYGCLEQTASGLFPSLYTSAAQLKALGISGDSDEKRRAAIDVGISRLLQMQLENGGFALWDREGPEEYWLTAYAMDFLVRASEQGYSVPVNAINKGNERLLRYLQEPGLMTVRYSDDAQASRFAAQAYAALVLARQQKAPLGALREIWSRHDQARSGLPLLQLGIALKTMGDAPRGDAALKLAVATPRQDENRWLGDYGSPLRDNDLKLALLEENKLLPEVQTQLLSTLSEEAYGQRWLSTQETNALFLAGRTLADLPGSWQAQTSLQA

SEQ ID NO: 587 - protein, 1492 aa, Klebsiella pneumoniae Aerogenes4140
VTNSIRLIGRGVRRMKPFRLAALSLALLTAFSLTGCDDSGTPQASAPAPAADSNPGATAKPDRAQLAALAEKSQGKALTLLDASEVQLDGAATLVLTFSVPLQPDQDFSRSVHLVDKKSGKVDGAWELAPNLKELRLRHLEPKRELIVSVDPTLTALNKATLDKPFEKTLTTRDIAPSVGFASRGSLLPGNVVAGLPVMALNVDNVDVNFFRIKPESLSAFVSQWEYRNSLSNWESDELLKMADLVYSGRFDLNPARNTREKLLLPLSDIKPLQQPGVYVAVMNPAGRYSYSNAATLFTLSDIGVSAHRYHNRLDVFTQSLENGAAQSGIEVQLLNAKGQTLAEAKSDSQGHVTLQTDKEAALLLARKEGQTTLLDLKLPALDLAEFSIAGAPGFSKQFFMFGPRDLYRPGETVILNALLRDSDGKPLAEQPVKLEVVQPDGQVIRSVMSKPVNGLYQFTYPLDSGAATGMWHIRASAGDNQPREWDFHVEDFMPERMALNLTPQAAPVAPDADVTFGVSGAYLYGAPASGNQLQGKLFLRPLRDAVAALPGFQFGDIAEENLSRSLDEVQLTLDEKGHGEVTTSSQWQDSHSPLQVVLQASLLESGGRPVTRTVKQPIWPAEALPGIRPQFTLKDVYDYRTDTTVKQPVVDENSNAAFDIVYADVKGEKKAISGLQVRLIRERRDYYWNWSDSEGWQSQFDQKDLQEGEESLDLQAGQIGKVSFPVEWGSYRLEVKGPDDVVSSVRFWAGYSWQDNSEGAGAARPDRVTMKLDKPSYKPGDTIRLHIAAPAAGKGYAMVESSEGPLWWQEIDVPAEGMDLSIPVDKTWNRHDLYLSTLVVRPGDKSRSATPKRAVGLLHLPLGDENRRLTLALEAPDKMRPNQPLTVKVKASVKEGEAPKQVNVLLSAVDSGVLNITDYATPDPWNAFFGQKRYGADIYDIYGQVIEGQGRVASLRFGGDGDELKRGGKPPVNHVTIVAQQAQPVVLNDQGEGTVTLPIGDFNGELRVMAQAWTADDFGSSEDKVVVAAPVIAELNTPRFLASGDTTRLALDLSNLTDQPQTLQVHLTASGLVTLTDGQLPPVQLAPGARSTLFIPVSALAGFGDGQVNATISGLSLPGETFAPLQKQWKIGVRPAYPAQTVNSGAVLQPGESWQPPAAQSQGFAPQTLQGQLLLSGKPPLNLARYIRELKAYPYGCLEQTASGLFPSLYTSAAQLKALGISGDSDEKRRAAIDVGISRLLQMQLDNGGFALWDREGPEEYWLTAYAMDFLVRASEQGYSVPVNAINKGNERLLRYLQEPGLMTVRYSDDAQASRFAAQAYAALVLARQQKAPLGALREIWSRHDQARSGLPLLQLGIALKTMGDAPRGDAALKLAVATPRQDENRWLGDYGSPLRDNALKLALLEENKLLPEVQTQLLSTLSEEAYGQRWLSTQETNALFLAGRTLADLPGSWQAQTSLQAEPLAGDKAQTRNLDGDRLAALQVSNTGSQ

SEQ ID NO: 588 - protein, 1457 aa, Klebsiella pneumoniae 1015
VTNCIRLIGRGVRRMKPFRLAALSLALLTAFSLTGCDDSGTPQASAPAPAADSNPGATAKPDRAQLAALAEKSQGKALTLLDASEVQLDGAATLVLTFSVPLQPDQDFSRSVHLVDKKSGKVDGAWELAPNLKELRLRHLEPKRELIVSVDPTLTALNKATLDKPFEKTLTTRDIAPSVGFASRGSLLPGNVVAGLPVMALNVDNVDVNFFRIKPESLSAFVSQWEYRNSLSNWESDELLKMADLVYTGRFDLNPARNTREKLLLPLSDIKPLQQPGVYVAVMNPAGRYSYSNAATLFTLSDIGVSAHRYHNRLDVFTQSLENGAAQSGIEVQLLNAKGQTLAEAKSDSQGHVTLQTDKEAALLLARKEGQTTLLDLKLPALDLAEFSIAGAPGFSKQFFMFGPRDLYRPGETVILNALLRDSDGKPLAEQPVKLEVVQPDGQVIRSVMSKPVNGLYQFTYPLDSGAATGMWHIRASAGDNQPREWDFHVEDFMPERMALNLTPQAAPVAPDADVTFGVSGAYLYGAPASGNQLQGKLFLRPLRDAVAALAGFQFGDIAEENLSRSLDEVQLTLDEKGHGEVTTSSQWQDSHSPLQVVLQASLLESGGRPVTRTVKQPIWPAEALPGIRPQFTLKDVYDYRTDTTVKQPVVDENSNAAFDIVYADVKGEKKAISGLQVRLIRERRDYYWNWSDSEGWQSQFDQKDLQEGEESLDLQAGQIGKVSFPVEWGSYRLEVKGPDDVVSSVRFWAGYSWQDNSEGAGAARPDRVTMKLDKPGYKPGDTIRLHIAAPAAGKGYAMVESSEGPLWWQEIDVPAEGMDLSIPVDKAWNRHDLYLSTLVVRPGDKSRSATPKRAVGLLHLPLGDENRRLTLALEAPDKIRPNQPLTVKVKASVKEGEAPKQVNVLLSAVDSGVLNITDYATPDPWNAFFGQKRYGADIYDIYGQVIEGQGRVASLRFGGDGDELKRGGKPPVNHVTIVAQQAQPVVLNDQGEGTVTLPIGDFNGELRVMAQAWTADDFGSSEDKVVVAAPVIAELNTPRFLASGDTTRLALDLSNLTDKPQTLQVHLTASGLVTLTEGQLPPVQLAPGARSTLFIPVSALTGFGDGQVNATISGLSLPGETFAPLQKQWKIGVRPAYPAQTVNSGAVLQPGESWQPPAAQSQGFAPQTLQGQLLLSGKPPLNLARYIRELKAYPYGCLEQTASGLFPSLYTSAAQLKALGISGDSDEKRRAAIDVGISRLLQMQLENGGFALWDREGPEEYWLTAYAMDFLVRASEQGYSVPVNAINKGNERLLRYLQEPGLMTVRYSDDAQASRFAAQAYAALVLARQQKAPLGALREIWSRHDQARSGLPLLQLGIALKTMGDAPRGDAALKLAVATPRQDENRWLGDYGSPLRDNALKLALLEENKLLPEVQNQLLSTLSEEAYGQRWLSTQETNALFLAGRTLADLPGSWQA

SEQ ID NO: 589 - protein, 1489 aa, Klebsiella pneumoniae i262/94
VTNCIRLIGRGVRRMKPFRLAALSLALLTAFSLTGCDDSGTPQASAPAPAADSNPGATAKPDRAQLAALAEKSQGKALTLLDASEVQLDGAATLVLTFSVPLQPDQDFSRSVHLVDKKSGKVDGAWELAPNLKELRLRHLEPKRELIVSVDPTLTALNKATLDKPFEKTLTTRDIAPSVGFASRGSLLPGNVVAGLPVMALNVDNVDVNFFRIKPESLSAFVSQWEYRNSLSNWESDELLKMADLVYTSRFDLNPARNTREKLLLPLSDIKPLQQPGVYVAVMNPAGRYSYSNAATLFTLSDIGVSAHRYHNRLDVFTQSLENGAAQSGIEVQLLNAKGQTLAEAKSDSQGHVTLQTDKEAALLLARKEGQTTLLDLKQSTVHKAEVSIAGAPVFSRQFRNPVRLLLRRAGETVLLHALLRDSDGKPLAEQPVKLEVVQPDGQVIRSVMSKPVNGLYQFTYPLDSGAATGMWHIRASAGDNQPREWDFHVEDFMPERMALNLTPQAAPVAPDADVTFGVSGAYLYGAPASGNQLQGKLFLRPLRDAVAALPGFQFGDIAEENLSRSLDEVQLTLDEKGHGEVTTSSQWQDSHSPLQVVLQASLLESGGRPVTRTVKQPIWPAEALPGIRPQFTLKDVYDYRTDTTVKQPVVDENSNAAFDIVYADVKGEKKAISGLQVRLIRERRDYYWNWSDSEGWQSQFDQKDLQEGEESLDLQAGQIGKVSFPVEWGSYRLEVKGPDDVVSSVRFWAGYSWQDNSEGAGAARPDRVTMKLDKPSYKPGDTIRLHIAAPAAGKGYAMVESSEGPLWWQEIDVPAEGMDLSIPVDKTWNRHDLYLSTLVVRPGDKSRSATPKRAVGLLHLPLGDENRRLTLALEAPDKMRPNQPLTVKVKASVKEGEAPKQVNVLLSAVDSGVLNITDYATPDPWNAFFGQKRYGADIYDIYGQVIEGQGRVASLRFGGDGDELKRGGKPPVNHVTIVAQQAQPVVLNDQGEGTVTLPIGDFNGELRVMAQAWTADDFGSSEDKVVVAAPVIAELNTPRFLASGDTTRLALDLSNLTDKPQTLQVHLTASGLVTLSEGQLPPVQLAPGARSTLFIPVSALAGFGDGQVNATISGLSLPGETFAPLQKQWKIGVRPAYPAQTVNSGAVLQPGESWQPPAAQTAGFAAQTLQGQLLLSGKPPLNLARYIRELKAYPYGCLEQTASGLFPSLYTSAAQLKALGISGDSDEKRRAAIDVGISRLLQMQLENGGFALWDREGPEEYWLTAYAMDFLVRASEQGYSVPVNAINKGNERLLRYLQEPGLMTVRYSDDAQASRFAAQAYAALVLARQQKAPLGALREIWSRHDQARSGLPLLQLGIALKTMGDAPRGDAALKLAVATPRQDENRWLGDYGSPLRDNALKLALLEENKLLPEVQNQLLSTLSEEAYGQRWLSTQETNALFLAGRTLADLPGSWQAQTSLQAEPLAGDKAQTRNLDGDRLAALQVSNT

SEQ ID NO: 590 - protein, 1476 aa, Klebsiella pneumoniae 919
VTNCIRLIGRGVRRMKPFRLAALSLALLTAFSLTGCDDSGTPQASAPAPAADSNPGATAKPDRAQLAALAEKSQGKALTLLDASEVQLDGAATLVLTFSVPLQPDQDFSRSVHLVDKKSGKVDGAWELAPNLKELRLRHLEPKRELIVSVDPTLTALNKATLDKPFEKTLTTRDIAPSVGFASRGSLLPGNVVAGLPVMALNVDNVDVNFFRIKPESLSAFVSQWEYRNSLSNWESDELLKMADLVYTSRFDLNPARNTREKLLLPLSDIKPLQQPGVYVAVMNPAGRYSYSNAATLFTLSDIGVSAHRYHNRLDVFTQSLENGAAQSGIEVQLLNAKGQTLAEAKSDSQGHVTLQTDKEAALLLARKEGQTTLLDLKQSALHKAKVSIAALSGFSRHIRNPVRLLLRRAGETELLHALLRDSDGKPLAEQPVKLEVVQPDGQVIRSVMSKPVNGLYQFTYPLDSGAATGMWHIRASAGDNQPREWDFHVEDFMPERMALNLTPQAAPVAPDADVTFGVSGAYLYGAPASGNQLQGKLFLRPLRDAVAALPGFQFGDIAEENLSRSLDEVQLTLDEKGHGEVTTSSQWQDSHSPLQVVLQASLLESGGRPVTRTVKQPIWPAEALPGIRPQFTLKDVYDYRTDTTVKQPVVDENSNAAFDIVYADVKGEKKAISGLQVRLIRERRDYYWNWSDSEGWQSQFDQKDLQEGEESLDLQAGQIGKVSFPVEWGSYRLEVKGPDDVVSSVRFWAGYSWQDNSEGAGAARPDRVTMKLDKPSYKPGDTIRLHIAAPAAGKGYAMVESSEGPLWWQEIDVPAEGMDLSIPVDKTWNRHDLYLSTLVVRPGDKSRSATPKRAVGLLHLPLGDENRRLTLALEAPDKMRPNQPLTVKVKASVKEGEAPKQVNVLLSAVDSGVLNITDYATPDPWNAFFGQKRYGADIYDIYGQVIEGQGRVASLRFGGDGDELKRGGKPPVNHVTIVAQQAQPVVLNDQGEGTVTLPIGDFNGELRVMAQAWTADDFGSSEDKVVVAAPVIAELNTPRFLASGDTTRLALDLSNLTDKPQTLQVHLTASGLVTLTEGQLPPVQLAPGARSTLFIPVSALAGFGDGQVNATISGLSLPGETFAPLQKQWKIGVRPAYPAQTVNSGAVLQPGESWQPPAAQSQGFAPQTLQGQLLLSGKPPLNLARYIRELKAYPYGCLEQTASGLFPSLYTSAAQLKALGISGDSDEKRRAAIDVGISRLLQMQLENGGFALWDREGPEEYWLTAYAMDFLVRASEQGYSVPVNAINKGNERLLRYLQEPGLMTVRYSDDAQASRFAAQAYAALVLARQQKAPLGALREIWSRHDQARSGLPLLQLGIALKTMGDAPRGDAALKLAVATPRQDENRWLGDYGSPLRDNALKLALLEENKLLPEVQNQLLSTLSEEAYGQRWLSTQETNALFLAGRTLADLPGSWQAQTSLQAEPLAGDKAQTRNL

SEQ ID NO: 591 - protein, 1490 aa, Klebsiella pneumoniae 313
VTNCIRLIGRGVRRMKPFRLAALSLALLTAFSLTGCDDSGTPQASAPAPAADSNPGATAKPDRAQLAALAEKSQGKALTLLDASEVQLDGAATLVLTFSVPLQPDQDFSRSVHLVDKKSGKVDGAWELAPNLKELRLRHLEPKRELIVSVDPTLTALNKATLDKPFEKTLTTRDIAPSVGFASRGSLLPGNVVAGLPVMALNVDNVDVNFFRIKPESLSAFVSQWEYRNSLSNWESDELLKMADLVYSGRFDLNPARNTREKLLLPLSDIKPLQQPGVYVAVMNPAGRYSYSNAATLFTLSDIGVSAHRYHNRLDVFTQSLENGAAQSGIEVQLLNAKGQTLAEAKSDSQGHVTLQTDKEAALLLARKEGQTTLLDLKLPALDLAEFSIAGAPSFSKHFFISGPRVLFRPGETVILNALLRDSDGKPLAEQPVKLEVVQPDGQVIRSVMSKPVNGLYQFTYPLDSGAATGMWHIRASAGDNQPREWDFHVEDFMPERMALNLTPQAAPVAPDADVTFGVSGAYLYGAPASGNQLQGKLFLRPLRDAVAALPGFQFGDIAEENLSRSLDEVQLTLDEKGHGEVTTSSQWQDSHSPLQVVLQASLLESGGRPVTRTVKQPIWPAEALPGIRPQFTLKDVYDYRTDTTVKQPVVDENSNAAFDIVYADVKGEKKAISGLQVRLIRERRDYYWNWSDSEGWQSQFDQKDLQEGEESLDLQAGQIGKVSFPVEWGSYRLEVKGPDDVVSSVRFWAGYSWQDNSEGAGAARPDRVTMKLDKPSYKPGDTIRLHIAAPAAGKGYAMVESSEGPLWWQEIDVPAEGMDLSIPVDKTWNRHDLYLSTLVVRPGDKSRSATPKRAVGLLHLPLGDENRRLTLALEAPDKMRPNQPLTVKVKASVKEGEAPKQVNVLLSAVDSGVLNITDYATPDPWNAFFGQKRYGADIYDIYGQVIEGQGRVASLRFGGDGDELKRGGKPPVNHVTIVAQQAQPVVLNDQGEGTVTLPIGDFNGELRVMAQAWTADDFGSSEDKVVVAAPVIAELNTPRFLASGDTTRLALDLSNLTDKPQTLQVHLTASGLVTLTDGQLPPVQLAPGARSTLFIPVSALAGFGDGQVNATISGLSLPGETFAPLQKQWKIGVRPAYPAQTVNSGAVLQPGESWQPPAAQSQGFAPQTLQGQLLLSGKPPLNLARYIRELKAYPYGCLEQTASGLFPSLYTSAAQLKALGISGDSDEKRRAAIDVGISRLLQMHLENGGFALWDREGPEEYWLTAYAMDFLVRASEQGYSVPGNAINKGNERLLRYLQEPGLMTVRYSDDAQASRFAAQAYAALVLARQQKAPLGALREIWSRHDQARSGLPLLQLGIALKTMGDAPRGDAALKLAVATPRQDENRWLGDYGSPLRDNALKLALLEENKLLPEVQNQLLSTLSEEAYGQRWLSTQETNALFLAGRTLADLPGSWQAQTSLQAEPLAGDKAQTRNLDGDRLAALQVSNTG

SEQ ID NO: 592 - protein, 1490 aa, Klebsiella pneumoniae 1470
VTNSIRLIGRGVRRMKPFRLAALSLALLTAFSLTGCDDSGTPQASAPAPAADSNPGATAKPDRAQLAALAEKSQGKALTLLDASEVQLDGAATLVLTFSVPLQPDQDFSRSVHLVDKKSGKVDGAWELAPNLKELRLRHLEPKRELIVSVDPTLTALNKATLDKPFEKTLTTRDIAPSVGFASRGSLLPGNVVAGLPVMALNVDNVDVNFFRIKPESLSAFVSQWEYRNSLSNWESDELLKMADLVYSGRFDLNPARNTREKLLLPLSDIKPLQQPGVYVAVMNPAGRYSYSNAATLFTLSDIGVSAHRYHNRLDVFTQSLENGAAQSGIEVQLLNAKGQTLAEAKSDSQGHVTLQTDKEAALLLARKEGQTTLLDLKLPALDLAEFSIAGAPGFSKQFFMFGPRDLYRPGETVILNALLRDSDGKPLAEQPVKLEVVQPDGQVIRSVMSKPVNGLYQFTYPLDSGAATGMWHIRASAGDNQPREWDFHVEDFMPERMALNLTPQAAPVAPDADVTFGVSGAYLYGAPASGNQLQGKLFLRPLRDAVAALPGFQFGDIAEENLSRSLDEVQLTLDEKGHGEVTTSSQWQDSHSPLQVVLQASLLESGGRPVTRTVKQPIWPAEALPGIRPQFTLKDVYDYRTDTTVKQPVVDENSNAAFDIVYADVKGEKKAISGLQVRLIRERRDYYWNWSDSEGWQSQFDQKDLQEGEESLDLQAGQIGKVSFPVEWGSYRLEVKGPDDVVSSVRFWAGYSWQDNSEGAGAARPDRVTMKLDKPSYKPGDTIRLHIAAPAAGKGYAMVESSEGPLWWQEIDVPAEGMDLSIPVDKTWNRHDLYLSTLVVRPGDKSRSATPKRAVGLLHLPLGDENRRLTLALEAPDKMRPNQPLTVKVKASVKEGEAPKQVNVLLSAVDSGVLNITDYATPDPWNAFFGQKRYGADIYDIYGQVIEGQGRVASLRFGGDGDELKRGGKPPVNHVTIVAQQAQPVVLNDQGEGTVTLPIGDFNGELRVMAQAWTADDFGSSEDKVVVAAPVIAELNTPRFLASGDTTRLALDLSNLTDQPQTLQVHLTASGLVTLTDGQLPPVQLAPGARSTLFIPVSALAGFGDGQVNATISGLSLPGETFAPLQKQWKIGVRPAYPAQTVNSGAVLQPGESWQPPAAQSQGFAPQTLQGQLLLSGKPPLNLARYIRELKAYPYGCLEQTASGLFPSLYTSAAQLKALGISGDSDEKRRAAIDVGISRLLQMQLENGGFALWDREGPEEYWLTAYAMDFLVRASEQGYSVPVNAINKGNERLLRYLQEPGLMTVRYSDDAQASRFAAQAYAALVLARQQKAPLGALREIWSRHDQARSGLPLLQLGIALKTMGDAPRGDAALKLAVATPRQDENRWLGDYGSPLRDNALKLALLEENKLLPEVQTQLLSTLSEEAYGQRWLSTQETNALFLAGRTLADLPGSWQAQTSLQAEPLAGDKAQTRNLDGDRLAALQVSNTG

SEQ ID NO: 593 - protein, 1492 aa, Klebsiella pneumoniae 1193
VTNSIRLIGRGVRRMKPFRLAALSLALLTAFSLTGCDDSGTPQASAPAPAADSNPGATAKPDRAQLAALAEKSQGKALTLLDASEVQLDGAATLVLTFSVPLQPDQDFSRSVHLVDKKSGKVDGAWELAPNLKELRLRHLEPKRELIVSVDPTLTALNKATLDKPFEKTLTTRDIAPSVGFASRGSLLPGNVVAGLPVMALNVDNVDVNFFRIKPESLSAFVSQWEYRNSLSNWESDELLKMADLVYSGRFDLNPARNTREKLLLPLSDIKPLQQPGVYVAVMNPAGRYSYSNAATLFTLSDIGVSAHRYHKRLDVFTQSLENGAAQSGIEVQLLNAKGQTLAEAKSDSQGHVTLQTDKEAALLLARKEGQTTLLDLKVPALDLAEFSSAAAPGFSKQSFMFVPRGLYRPGETVILNALLRDSDGKPLAEQPVKLEVVQPDGQVIRSVMSKPVNGLYQFTYPLDSGAATGMWHIRASAGDNQPREWDFHVEDFMPERMALNLTPQAAPVAPDADVTFGVSGAYLYGAPASGNQLQGKLFLRPLRDAVAALPGFQFGDIAEENLSRSLDEVQLTLDEKGHGEVTTSSQWQDSHSPLQVVLQASLLESGGRPVTRTVKQPIWPAEALPGIRPQFTLKDVYDYRTDTTVKQPVVDENSNAAFDIVYADVKGEKKAISGLQVRLIRERRDYYWNWSDSEGWQSQFDQKDLQEGEESLDLQAGQIGKVSFPVEWGSYRLEVKGPDDVVSSVRFWAGYSWQDNSEGAGAARPDRVTMKLDKPSYKPGDTIRLHIAAPAAGKGYAMVESSEGPLWWQEIDVPAEGMDLSIPVDKTWNRHDLYLSTLVVRPGDKSRSATPKRAVGLLHLPLGDENRRLTLALEAPDKMRPNQPLTVKVKASVKEGEAPKQVNVLLSAVDSGVLNITDYATPDPWNAFFGQKRYGADIYDIYGQVIEGQGRVASLRFGGDGDELKRGGKPPVNHVTIVAQQAQPVVLNDQGEGTVTLPIGDFNGELRVMAQAWTADDFGSSEDKVVVAAPVIAELNTPRFLASGDTTRLALDLSNLTDKPQTLQVHLTASGLVTLSEGQLPPVQLAPAARSTLFIPVSALAGFGDGQVNATISGLSLPGETFAPLQKQWKIGVRPAYPAQTVNSGAVLQPGESWQPPAAQSQGFAPQTLQGQLLLSGKPPLNLARYIRELKAYPYGCLEQTASGLFPYLYTSAAQLKALGISGDSDEKRRAAIDVGISRLLQMQLENGGFALWDREGAEEYWLTAYAMDFLVRASEQGYSVPVNAINKGNERLLRYLQEPGLMTVRYSDDAQASRFAAQAYAALVLARQQKAPLGALREIWSRHDQARSGLPLLQLGIALKTMGDAPRGDAALKLAVATPRQDENRWLGDYGSPLRDNALKLALLEENKLLPEVQNQLLSTLSEEAYGQRWLSTQETNALFLAGRTLADLPGSWQAQTSLQAEPLAGDKAQTRNLDGDRLAALQVSNTGSQ

SEQ ID NO: 594 - protein, 1490 aa, Klebsiella pneumoniae Mich61
VTNCIRLIGRGVRRMKPFRLAALSLALLTAFSLTGCDDSGTPQASAPAPAADSNPGATAKPDRAQLAALAEKSQGKALTLLDASEVQLDGAATLVLTFSVPLQPDQDFSRSVHLVDKKSGKVDGAWELAPNLKELRLRHLEPKRELIVSVDPTLTALNKATLDKPFEKTLTTRDIAPSVGFASRGSLLPGNVVAGLPVMALNVDNVDVNFFRIKPESLSAFVSQWEYRNSLSNWESDELLKMADLVYTGRFDLNPARNTREKLLLPLSDIKPLQQPGVYVAVMNPAGRYSYSNAATLFTLSDIGVSAHRYHNRLDVFTQSLENGAVQSGIEVQLLNAKGQTLAEAKSDSQGHVTLQTDKEAALLLARKEGQTTLLDLKLPALDLAEFSIAGAPGFSKQFFMFGPRDLYRPGETVILNALLRDSDGKPLAEQPVKLEVVQPDGQVIRSVMSKPVNGLYQFTYPLDSGAATGMWHIRASAGDNQPREWDFHVEDFMPERMALNLTPQAAPVAPDADVTFGVSGAYLYGAPASGNQLQGKLFLRPLRDAVAALPGFQFGDIAEENLSRSLDEVQLTLDEKGHGEVTTSSQWQDSHSPLQVVLQASLLESGGRPVTRTVKQPIWPAEALPGIRPQFTLKDVYDYRTDTTVKQPVVDENSNAAFDIVYADVKGEKKAISGLQVRLIRERRDYYWNWSDSEGWQSQFDQKDLQESEESLDLQAGQIGKVSFPVEWGSYRLEVKGPDDVVSSVRFWAGYSWQDNSEGAGAARPDRVTMKLDKPGYKPGDTIRLHIAAPAAGKGYAMVESSEGPLWWQEIDVPAEGMDLSIPVDKTWNRHDLYLSTLVVRPGDKSRSATPKRAVGLLHLPLGDENRRLTLALEAPDKIRPNQPLTVKVKASVKEGEAPKQVNVLLSAVDSGVLNITDYATPDPWNAFFGQKRYGADIYDIYGQVIEGQGRVASLRFGGDGDELKRGGKPPVNHVTIVAQQAQPVVLNDQGEGTVTLPIGDFNGELRVMAQAWTADDFGSSEDKVVVAAPVIAELNTPRFLASGDTTRLALDLSNLTDKPQTLQVHLTASGLVTLTEGQLPPVQLAPGARSTLFIPVSALAGFGDGQVNATISGLSLPGETFAPLQKQWKIGVRPAYPAQTVNSGAVLQPGESWQPPAAQSQGFAPQTLQGQLLLCGKPPLNLARYIRELKAYPYGCLEQTASGLFPSLYTSAAQLKALGISGDSDEKRRAAIDVGISRLLQMQLENGGFALWDREGPEEYWLTAYAMDFLVRASEQGYSVPVNAINKGNERLLRYLQEPGLMTVRYSDDAQASRFAAQAYAALVLARQQKAPLGALREIWSRHDQARSGLPLLQLGIALKTMGDAPRGDAALKLAIATPRQDENRWLGDYGSPLRDNALKLALLEENKLLPEVQNQLLSTLSEEAYGQRWLSTQETNALFLAGRTLADLPGSWQAKTSLQAEPLAGDKAQTRNLDGDRLAALQVSNTA

SEQ ID NO: 595 - protein, 1491 aa, Klebsiella pneumoniae 2069/49
VTNCIRLIGRGVRRMKPFRLAALSLALLTAFSLTGCDDSGTPQASAPAPAADSNPGATAKPDRAQLAALAEKSQGKALTLLDASEVQLDGAATLVLTFSVPLQPDQDFSRSVHLVDKKSGKVDGAWELAPNLKELRLRHLEPKRELIVSVDPTLTALNKATLDKPFEKTLTTRDIAPSVGFASRGSLLPGNVVAGLPVMALNVDNVDVNFFRIKPESLSAFVSQWEYRNSLSNWESDELLKMADLVYTSRFDLNPARNTREKLLLPLSDIKPLQQPGVYVAVMNPAGRYSYSNAATLFTLSDIGVSAHRYHNRLDVFTQSLENGAAQSGIEVQLLNAKGQTLAEAKSDSQGHVTLQTDKEAALLLARKEGQTTLLDLKLPALDLAEFSIAGAPGFSKQFFMFGPRDLYRPGETVILNALLRDSDGKPLAEQPVKLEVVQPDGQVIRSVMSKPVNGLYQFTYPLDSGAATGMWHIRASAGDNQPREWDFHVEDFMPERMALNLTPQAAPVAPDADVTFGVSGAYLYGAPASGNQLQGKLFLRPLRDAVAALPGFQFGDIAEENLSRSLDEVQLTLDEKGHGEVTTSSQWQDSHSPLQVVLQASLLESGGRPVTRTVKQPIWPAEALPGIRPQFTLKDVYDYRTDTTVKQPVVDENSNAAFDIVYADVKGEKKAISGLQVRLIRERRDYYWNWSDSEGWQSQFDQKDLQEGEESLDLQAGQIGKVSFPVEWGSYRLEVKGPDDVVSSVRFWAGYSWQDNSEGAGAARPDRVTMKLDKPGYKPGDTIRLHIAAPAAGKGYAMVESSEGPLWWQEIDVPAEGMDLSIPVDKTWNRHDLYLSTLVVRPGDKSRSATPKRAVGLLHLPLGDENRRLTLALEAPDKMRPNQPLTVKVKASVKEGEAPKQVNVLLSAVDSGVLNITDYATPDPWNAFFGQKRYGADIYDIYGQVIEGQGRVASLRFGGDGDELKRGGKPPVNHVTIVAQQAQPVVLNDQGEGTVTLPIGDFNGELRVMAQAWTADDFGSSEDKVVVAAPVIAELNTPRFLASGDTTRLALDLSNLTDKPQTLQVHLTASGLVTLTEGQLPPVQLAPGARSTLFIPVSALAGFGDGQVNATISGLSLPGETFAPLQKQWKIGVRPAYPAQTVNSGAVLQPGESWQPPAAQSQGFSPQTLQGQLLLSGKPPLNLARYIRELKAYPYGCLEQTASGLFPSLYTSAAQLKALGISGDSDEKRRAAIDVGISRLLQMQLENGGFALWDREGPEEYWLTAYAMDFLVRASEQGYSVPVNAINKGNERLLRYLQEPGLMTVRYSDDAQASRFAAQAYAALVLARQQKAPLGALREIWSRHDQARSGLPLLQLGIALKTMGDAPRGDAALKLAVATPRQDENRWLGDYGSPLRDNALKLALLEENKLLPEVQNQLLSTLSEEAYGQRWLSTQETNALFLAGRTLADLPGSWQAKTSLQAEPLAGDKAQTRNLDGDRLAALQVSNTGS

SEQ ID NO: 596 - protein, 1489 aa, Klebsiella pneumoniae 2005/49
VTNCIRLIGRGVRRMKPFRLAALSLALLTAFSLTGCDDSGTPQASAPAPAADSNPGATAKPDRAQLAALAEKSQGKALTLLDASEVQLDGAATLVLTFSVPLQPDQDFSRSVHLVDKKSGKVDGAWELAPNLKELRLRHLEPKRELIVSVDPTLTALNKATLDKPFEKTLTTRDIAPSVGFASRGSLLPGNVVAGLPVMALNVDNVDVNFFRIKPESLSAFVSQWEYRNSLSNWESDELLKMADLVYSGRFDLNPARNTREKLLLPLSDIKPLQQPGVYVAVMNPAGRYSYSNAATLFTLSDIGVSAHRYHNRLDVFTQSLENGAAQSGIEVQLLNAKGQTLAEAKSDSQGHVTLQTDKEAALLLARKEGQTTLLDLKLPALDLAEFSIAGAPGFSKQFFMFGPRDLYRPGETVILNALLRDSDGKPLAEQPVKLEVVQPDGQVIRSVMSKPVNGLYQFTYPLDSGAATGMWHIRASAGDNQPREWDFHVEDFMPERMALNLTPQAAPVAPDADVTFGVSGAYLYGAPASGNQLQGKLFLRPLRDAVAALPGFQFGDIAEENLSRSLDEVQLTLDEKGHGEVTTSSQWQDSHSPLQVVLQASLLESGGRPVTRTVKQPIWPAEALPGIRPQFTLKDVYDYRTDTTVKQPVVDENSNAAFDIVYADVKGEKKAISGLQVRLIRERRDYYWNWSDSEGWQSQFDQKDLQEGEESLDLQAGQIGKVSFPVEWGSYRLEVKGPDDVVSSVCFWAGYSWQDNSEGAGAARPDRVTMKLDKPSYKPGDTIRLHIAAPAAGKGYAMVESSEGPLWWQEIDVPAEGMDLSIPVDKTWNRHDLYLSTLVVRPGDKSRSATPKRAVGLLHLPLGDENRRLTLALEAPDKMRPNQPLTVKVKASVKEGEAPKQVNVLLSAVDSGVLNITDYATPDPWNAFFGQKRYGADIYDIYGQVIEGQGRVASLRFGGDGDELKRGGKPPVNHVTIVAQQAQPVVLNDQGEGTVTLPIGDFNGELRVMAQAWTADDFGSSEDKVVVAAPVIAELNTPRFLASGDTTRLALDLSNLTDKPQTLQVHLTASGLVTLSEGQLPPVQLAPGARSTLFIPVSALAGFGDGQVNATISGLSLPGETFAPLQKQWKIGVRPAYPAQTVNSGAVLQPGESWQPPAAQSQGFAPQTLQGQLLLSGKSPLNLARYIRELKAYPYGCLEQTASGLFPSLYTSAAQLKALGISGDSDEKRRAAIDVGISRLLQMQLENGGFALWDREGPEEYWLTAYAMDFLVRASEQGYSVPVNAINKGNERLLRYLQEPGLMTVRYSDDAQASRFAAQAYAALVLARQQKAPLGALREIWSRHDQARSGLPLLQLGIALKTMGDAPRGDAALKLAIATPRQDENRWLGDYGSPLRDNALKLALLEENKLLPEVQNQLLSTLSEEAYGQRWLSTQETNALFLAGRTLADLPGSWQAQTSLQAEPLAGDKAQTRNLDGDRLAALQVSNT

SEQ ID NO: 597 - protein, 1419 aa, Klebsiella pneumoniae 1702/49
VTNCIRLIGRGVRRMKPFRLAALSLALLTAFSLTGCDDSGTPQASAPAPAADSNPGATAKPDRAQLAALAEKSQGKALTLLDASEVQLDGAATLVLTFSVPLQPDQDFSRSVHLVDKKSGKVDGAWELAPNLKELRLRHLEPKRELIVSVDPTLTALNKATLDKPFEKTLTTRDIAPSVGFASRGSLLPGNVVAGLPVMALNVDNVDVNFFRIKPESLSAFVSQWEYRNSLSNWESDELLKMADLVYSGRFDLNPARNTREKLLLPLSDIKPLQQPGVYVAVMNPAGRYSYSNAATLFTLSDIGVSAHRYHNRLDVFTQSLENGAAQSGIEVQLLNAKGQTLAEAKSDSQGHVTLQTDKEAALLLARKEGQTTLLDLKLPALDLAEFSIAGAPGFSKQFFMFGPRDLYRPGETVILNALLRDSDGKPLAEQPVKLEVVQPDGQVIRSVMSKPVNGLYQFTYPLDSGAATGMWHIRASAGDNQPREWDFHVEDFMPERMALNLTPQAAPVAPDADVTFGVSGAYLYGAPASGNQLQGKLFLRPLRDAVAALPGFQFGDIAEENLSRSLDEVQLTLDEKGHGEVTTSSQWQDSHSPLQVVLQASLLESGGRPVTRTVKQPIWPAEALPGIRPQFTLKDVYDYRTDTTVKQPVVDENSNAAFDIVYADVKGEKKAISGLQVRLIRERRDYYWNWSDSEGWQSQFDQKDLQEGEESLDLQAGQIGKVSFPVEWGSYRLEVKGPDDVVSSVRFWAGYSWQDNSEGAGAARPDRVTMKLDKPSYKPGDTIRLHIAAPAAGKGYAMVESSEGPLWWQEIDVPAEGMDLSIPVDKTWNRHDLYLSTLVVRPGDKSRSATPKRAVGLLHLPLGDENRRLTLALEAPDKMRPNQPLTVKVKASVKEGEAPKQVNVLLSAVDSGVLNITDYATPDPWNAFFGQKRYGADIYDIYGQVIEGQGRVASLRFGGDGDELKRGGKPPVNHVTIVAQQAQPVVLNDQGEGTVTLPIGDFNGELRVMAQAWTADDFGSSEDKVVVAAPVIAELNTPRFLASGDTTRLALDLSNLTDKPQTLQVHLTASGLVTLTEGQLPPVQLAPGARSTLFIPVSALAGFGDGQVNATISGLSLPGETFAPLQKQWKIGVRPAYPAQTVNSGAVLQPGESWQPPAAQSQGFAPQTLQGQLLLSGKPPLNLARYIRELKAYPYGCLEQTASGLFPSLYTSAAQLKALGISGDSDEKRRAAIDVGISRLLQMQLENGGFALWDREGPEEYWLTAYAMDFLVRASEQGYSVPVNAINKGNERLLRYLQEPGLMTVRYSDDAQASRFAAQAYAALVLARQQKAPLGALREIWSRHDQARSGLPLLQLGIALKTMGDAPRGDAALKLAIATPRQDENRWLGDYGSPLRDNALKLALLEENKLLPEVLKAL

SEQ ID NO: 598 - protein, 1489 aa, Klebsiella pneumoniae 1996/49
VTNSIRLIGRGVRRMKPFRLAALSLALLTAFSLTGCDDSGTPQASAPAPAADSNPGATAKPDRAQLAALAEKSQGKALTLLDASEVQLDGAATLVLTFSVPLQPDQDFSRSVHLVDKKSGKVDGAWELAPNLKELRLRHLEPKRELIVSVDPTLTALNKATLDKPFEKTLTTRDIAPSVGFASRGSLLPGNVVAGLPVMALNVDNVDVNFFRIKPESLSAFVSQWEYRNSLSNWESDELLKMADLVYSGRFDLNPARNTREKLLLPLSDIKPLQQPGVYVAVMNPAGRYSYSNAATLFTLSDIGVSAHRYHNRLDVFTQSLENGAAQSGIEVQLLNAKGQTLAEAKSDSQGHVTLQTDKEAALLLARKEGQTTLLDLKLPALDLAEFSIAGAPGFSKQFFMFGPRDLYRPGETVILNALLRDSDGKPLAEQPVKLEVVQPDGQVIRSVMSKPVNGLYQFTYPLDSGAATGMWHIRASAGDNQPREWDFHVEDFMPERMALNLTPQAAPVAPDADVTFGVSGAYLYGAPASGNQLQGKLFLRPLRDAVTALPGFQFGDIAEENLSRSLDEVQLTLDEKGHGEVTTSSQWQDSHSPLQVVLQASLLESGGRPVTRTVKQPIWPAEALPGIRPQFTLKDVYDYRTDTTVKQPVVDENSNAAFDIVYADVKGEKKAISGLQVRLIRERRDYYWNWSDSEGWQSQFDQKDLQEGEESLDLQAGQIGKVSFPVEWGSYRLEVKGPDDVVSSVRFWAGYSWQDNSEGAGAARPDRVTMKLDKPSYKPGDTIRLHIAAPAAGKGYAMVESSEGPLWWQEIDVPAEGMDLSIPVDKTWNRHDLYLSTLVVRPGDKSRSATPKRAVGLLHLPLGDENRRLTLALEAPDKMRPNQPLTVKVKASVKEGEAPKQVNVLLSAVDSGVLNITDYATPDPWNAFFGQKRYGADIYDIYGQVIEGQGRVASLRFGGDGDELKRGGKPPVNHVTIVAQQAQPVVLNDQGEGTVTLPIGDFNGELRVMAQAWTADDFGSSEDKVVVAAPVIAELNTPRFLASGDTTRLALDLSNLTDQPQTLQVHLTASGLVTLTDGQLPPVQLAPGARSTLFIPVSALAGFGDGQVNATISGLSLPGETFAPLQKQWKIGVRPAYPAQTVNSGAVLQPGESWQPPAAQSQGFAPQTLQGQLLLSGKPPLNLARYIRELKAYPYGCLEQTASGLFPSLYTSAAQLKALGISGDSDEKRRAAIDVGISRLLQMQLENGGFALWDREGPEEYWLTAYAMDFLVRASEQGYSVPVNAINKGNERLLRYLQEPGLMTVRYSDDAQASRFAAQAYAALVLARQQKAPLGALREIWSRHDQARSGLPLLQLGIALKTMGDAPRGDAALKLAVATPRQDENRWLGDYGSPLRDNALKLALLEENKLLPEVQTQLLSTLSEEAYGQRWLSTQETNALFLAGRTLADLPGSWQAQTSLQAEPLAGDKAQTRNLDGDRLAALQVSNT

SEQ ID NO: 599 - protein, 1484 aa, Klebsiella pneumoniae 1680/49
VTNCIRLIGRGVRRMKPFRLAALSLALLTAFSLTGCDDSGTPQASAPAPAADSNPGATAKPDRAQLAALAEKSQGKALTLLDASEVQLDGAATLVLTFSVPLQPDQDFSRSVHLVDKKSGKVDGAWELAPNLKELRLRHLEPKRELIVSVDPTLTALNKATLDKPFEKTLTTRDIAPSVGFASRGSLLPGNVVAGLPVMSLNVDNVDVNFFRIKPESLSAFVSQWEYRNSLSNWESDELLKMADLVYSGRFDLNPARNTREKLLLPLSDIKPLQQPGVYVAVMNPAGRYSYSNAATLFTLSDIGVSAHRYHNRLDVFTQSLENGAAQSGIEVQLLNAKGQTLAEAKSDSQGHVTLQTDKEAALLLARKEGQTTLLDLKLPALDLAEFSIAGAPGFSKQFFMFGPRDLYRPGETVILNALLRDSDGKPLAEQPVKLEVVQPDGQVIRSVMSKPVNGLYQFTYPLDSGAATGMWHIRASAGDNQPREWDFHVEDFMPERMALNLTPQAAPVAPDADVTFGVSGAYLYGAPASGNQLQGKLFLRPLRDAVAALPGFQFGDIAEENLSRSLDEVQLTLDEKGHGEVTTSSQWQDSHSPLQVVLQASLLESGGRPVTRTVKQPIWPAEALPGIRPQFTLKDVYDYRTDTTVKQPVVDENSNAAFDIVYADVKGEKKAISGLQVRLIRERRDYYWNWSDSEGWQSQFDQKDLQEGEESLDLQAGQIGKVSFPVEWGSYRLEVKGPDDVVSSVRFWAGYSWQDNSEGAGAARPDRVTMKLDKPSYKPGDTIRLHIAAPAAGKGYAMVESSEGPLWWQEIDVRAEGMDLSIPVDKTWNRHDLYLSTLVVRPGDKSRSATPKRAVGLLHLPLGDENRRLTLALEAPDKMRPNQPLTVKVKASVKEGEAPKRVNVLLSAVDSGVLNITDYATPDPWNAFFGQKRYGADIYDIYGQVIEGQGRVASLRFGGDGDELKRGGKPPVNHVTIVAQQAQPVVLNDQGEGTVTLPIGDFNGELRVMAQAWTADDFGSSEDKVVVAAPVIAELNTPRFLASGDTTRLALDLSNLTDKPQTLQVHLTASGLVTLSEGQLPPVQLAPGARSTLFIPVSALAGFGDGQVNATISGLSLPGETFAPLQKQWIIGVRPAYPAQTVNSGAVLQPGESWQPPAAQSQGFAPQTLQGQLLLSGKPPLNLARYIRELKAYPYGCLEQTASGLFPSLYTSAAQLKALGISGDSDEKRRAAIDVGISRLLQMQLENGGFALWDREGPEEYWLTAYAMDFLVRASEQGYSVPVNAINKGNERLLRYLQEPGLMTVRYSDDAQASRFAAQAYAALVLARQQKAPLGALREIWSRHDQARSGLPLLQLGIALKTMGDAPRGDAALKLAVATPRQDENRWLGDYGSPLRDNALKLALLEENKLLPEVQNQLLSTLSEEAYGQRWLSTQETNALFLAGRTLADLPGSWQAQPLLQAEPLAGDKPQTGSRDGDQLAAL

SEQ ID NO: 600 - protein, 1489 aa, Klebsiella pneumoniae 2002/49
VTNCIRLIGRGVRRMKPFRLAALSLALLTAFSLTGCDDSGTPQASAPAPAADSNPGATAKPDRAQLAALAEKSRGKALTLLDASEVQLDGAATLVLTFSVPLQPDQDFSRSVHLVDKKSGKVDGAWELAPNLKELRLRHLEPKRELIVSVDPTLTALNKATLDKPFEKTLTTRDIAPSVGFASRGSLLPGNVVAGLPVMALNVDNVDVNFFRIKPESLSAFVSQWEYRNSLSNWESDELLKMADLVYSGRFDLNPARNTREKLLLPLSDIKPLQQPGVYVAVMNPAGRYSYSNAATLFTLSDIGVSAHRYHNRLDVFTQSLENGAAQSGIEVQLLNAKGQTLAEAKSDSQGHVTLQTDKEAALLLARKEGQTTLLDLKLPALDLAEFSIAGAPGFSKQFFMFGPRDLYRPGETVILNALLRDSDGWPRAEQPVKLEVVQPDGQVIRSVMSKPVNGLYQFTYPLDSGAATGMWHIRASAGDNQPREWDFHVEDFMPERMALNLTPQAAPVAPDADVTFGVSGAYLYGAPASGNQLQGKLFLRPLRDAVAALPGFQFGDIAEENLSRSLDEVQLTLDEKGHGEVTTSSQWQDSHSPLQVVLQASLLESGGRPVTRTVKQPIWPAEALPGIRPQFTLKDVYDYRTDTTVKQPVVDENSNAAFDIVYADVKGEKKAISGLQVRLIRERRDYYWNWSDSEGWQSQFDQKDLQEGEESLDLQAGQIGKVSFPVEWGSYRLEVKGPDDVVSSVRFWAGYSWQDNSEGAGAARPDRVTMKLDKPSYKPGDTIRLHIAAPAAGKGYAMVESSEGPLWWQEIDVPAEGMNLSIPVDKTWNRHDLYLSTLVVRPGDKSRSATPKRAVGLLHLPLGDENRRLTLALEAPDKMRPNQPLTVKVKASVKEGEAPKQVNVLLSAVDSGVLNITDYATPDPWNAFFGQKRYGADIYDIYGQVIEGQGRVASLRFGGDGDELKRGGKPPVNHVTIVAQQAQPVVLNDQGEGTVTLPIGDFNGELRVMAQAWTADDFGSSEDKVVVAAPVIAELNTPRFLASGDTTRLALDLSNLTDKPQTLQVHLTASGLVTLTDGQLPPVQLAPGARSTLFIPVSALAGFGDGQVNATISGLSLPGETFAPLQKQWKIGVRPAYPAQTVNSGAVLQPGESWQPPAAQSQGFAPQTLQGQLLLSGKPPLNLARYIRELKAYPYGCLEQTASGLFPSLYTSAAQLKALGISGDSDEKRRAAIDVGISRLLQMQLENGGFALWDREGPEEYWLTAYAMDFLVRASEQGYSVPVNAINKGNERLLRYLQEPGLMTVRYSDDAQASRFAAQAYAALVLARQQKAPLGALREIWSRHDQARSGLPLLQLGIALKTMGDAPRGDAALKLAVATPRQDENRWLGDYGSPLRDNALKLALLEENKLLPEVQTQLLSTLSEEAYGQRWLSTQETNALFLAGRTLADLPGSWQAQTSLQAEPLAGDKAQTRNLDGDRLAALQVSNT

SEQ ID NO: 601 - protein, 1482 aa, Klebsiella pneumoniae 6613
VTNCIRLIGRGVRRMKPFRLAALSLALLTAFSLTGCDDSGTPQASAPAPAATAKPDLAQLAALAEKSQGKALTLLDASEVQLDGAATLVLTFSVPLQPDQDFSRSVHLVDKKSGKVDGAWELAPNLKELRLRHLEPKRELIVSVDPTLTALNKATLDKPFEKTLTTRDIAPSVGFASRGSLLPGNVVAGLPVMALNVDNVDVNFFRIKPESLSAFVSQWEYRNSLSNWESDELLKMADLVYSGRFDLNPARNTREKLLLPLSDIKPLQQPGVYVAVMNPAGRYSYSNAATLFTLSDIGVSAHRYHNRLEVFTQSLENGAAQSGIEVQLLNAKGQTLAEAKSDSQGHVTLQTDKEAALLLARKEGQTTLLDLKLPALDLAEFSIAGAPGFSKQFFMFGPRDLYRPGETVILNALLRDSDGKPLAEQPVKLEVVQPDGQVIRSVMSKPVNGLYQFTYPLDSGAATGMWHIRASAGDNQPREWDFHVEDFMPERMALNLTPQAAPVAPDADVTFGVSGAYLYGAPASGNQLQGKLFLRPLRDAVAALPGFQFGDIAEENLSRSLDEVQLTLDEKGHGEVTTSSQWQDSHSPLQVVLQASLLESGGRPVTRTVKQPIWPAEALPGIRPQFTLKDVYDYRTDTTVKQPVVDENSNAAFDIVYADVKGEKKAISGLQVRLIRERRDYYWNWSDSEGWQSQFDQKDLQEGEESLDLQAGQIGKVSFPVEWGSYRLEVKGPDDVVSSVRFWAGYSWQDNSEGAGAARPDRVTMKLDKPSYKPGDTIRLHIAAPAAGKGYAMVESSEGPLWWQEIDVPAEGMDLSIPVDKTWNRHDLYLSTLVVRPGDKSRSATPKRAVGLLHLPLGDENRRLTLALEAPDKMRPNQPLTVKVKASVKEGEAPKQVNVLLSAVDSGVLNITDYATPDPWNAFFGQKRYGADIYDIYGQVIEGQGRVASLRFGGDGDELKRGGKPPVNHVTIVAQQAQPVVLNDQGEGTVTLPIGDFNGELRVMAQAWTADDFGSSEDKVVVAAPVIAELNTPRFLASGDTTRLALDLSNLTDKPQTLQVHLTASGLVTLTDGQLPPVQLAPGARSTLFIPVSALAGFGDGQVNATISGLSLPGETFAPLQKQWKIGVRPAYPAQTVNSGAVLQPGESWQPPAAQSQGFAPQTLQGQLLLSGKPPLNLARYIRELKAYPYGCLEQTASGLFPSLYTSAAQLKALGISGDSDEKRRAAIDVGISRLLQMQLENGGFALWDREGPEEYWLTAYAMDFLVRASEQGYSVPVNAINKGNERLLRYLQEPGLMTVRYSDDAQASRFAAQAYAALVLARQQKAPLGALREIWSRHDQARSGLPLLQLGIALKTMGDAPRGDAALKLAVATPRQDENRWLGDYGSPLRDNALKLALLEENKLLPEVQNQLLSTLSEEAYGQRWLSTQETNALFLAGRTLADLPGSWQAQTSLQAEPLAGDKAPRNLDGDRLAALQVSNT

SEQ ID NO: 602 - protein, 1240 aa, Klebsiella pneumoniae 5758
VTNCIRLIGRGVRRMKPFRLAALSLALLTAFSLTGCDDSGTPQASAPAPAATAKPDLAQLAALAEKSQGKALTLLDASEVQLDGAATLVLTFSVPLQPDQDFSRSVHLVDKKSGKVDGAWELAPNLKELRLRHLEPKRELIVSVDPTLTALNKATLDKPFEKTLTTRDIAPSVGFASRGSLLPGNVVAGLPVMALNVDNVDVNFFRIKPESLSAFVSQWEYRNSLSNWESDELLKMADLVYSGRFDLNPARNTREKLLLPLSDIKPLQQPGVYVAVMNPAGRYSYSNAATLFTLSDIGVSAHRYHNRLEVFTQSLENGAAQSGIEVQLLNAKGQTLAEAKSDSQGHVTLQTDKEAALLLARKEGQTTLLDLKLPALDLAEFSIAGAPGFSKQFFMFGPRDLYRPGATVILNALLRDSDGKPLAEQPVKLEVVQPDGQVIRSVMSKPVNGLYQFTYPLDSGAATGMWHIRASAGDNQPREWDFHVEDFMPERMALNLTPQAAPVAPDADVTFGVSGAYLYGAPASGNQLQGKLFLRPLRDAVAALPGFQFGDIAEENLSRSLDEVQLTLDEKGHGEVTTSSQWQDSHSPLQVVLQASLLESGGRPVTRTVKQPIWPAEALPGIRPQFTLKDVYDYRTDTTVKQPVVDENSNAAFDIVYADVKGEKKAISGLQVRLIRERRDYYWNWSDSEGWQSQFDQKDLQEGEESLDLQAGQIGKVSFPVEWGSYRLEVKGPDDVVSSVRFWAGYSWQDNSEGAGAARPDRVTMKLDKPSYKPGDTIRLHIAAPAAGKGYAMVESSEGPLWWQEIDVPAEGMDLSIPVDKTWNRHDLYLSTLVVRPGDKSRSATPKRAVGLLHLPLGDENRRLTLALEAPDKMRPNQPLTVKVKASVKEGEAPKQVNVLLSAVDSGVLNITDYATPDPWNAFFGQKRYGADIYDIYGQVIEGQGRVASLRFGGDGDELKRGGKPPVNHVTIVAQQAQPVVLNDQGEGTVTLPIGDFNGELRVMAQAWTADDFGSSEDKVVVAAPVIAELNTPRFLASGDTTRLALDLSNLTDKPQTLQVHLTASGLVTLTDGQLPPVQLAPGARSTLFIPVSALAGFGDGQVNATISGLSLPGETFAPLQKQWKIGVRPAYPAQTVNSGAVLQPGESWQPPAAQSQGFAPQTLQGQLLLSGKPPLNLARYIRELKAYPYGCLEQTASGLFPSLYTSAAQLKALGISGDSDEKRRAAIDVGISRLLQMQL

SEQ ID NO: 603 - protein, 1492 aa, Klebsiella pneumoniae 7824
VTNCIRLIGRGVRRMKPFRLAALSLALLTAFSLTGCDDSGTPQASAPAPAADSNPGATAKPDRAQLAALAEKSQGKALTLLDASEVQLDGAATLVLTFSVPLQPDQDFSRSVHLVDKKSGKVDGAWELAPNLKELRLRHLEPKRELIVSVDPTLTALNKATLDKPFEKTLTTRDIAPSVGFASRGSLLPGNVVAGLPVMALNVDNVDVNFFRIKPESLSAFVSQWEYRNSLSNWESDELLKMADLVYSGRFDLNPARNTREKLLLPLSDIKPLQQPGVYVAVMNPAGRYSYSNAATLFTLSDIGVSAHRYHNRLDVFTQSLENGAAQSGIEVQLLNAKGQTLAEAKSDSQGHVTLQTDKEAALLLARKEGQTTLLDLKLPALDLAEFSIAGAPGFSKQFFMFGPRDLYRPGETVILNALLRDSDGKPLAEQPVKLEVVQPDGQVIRSVMSKPVNGLYQFTYPLDSGAATGMWHIRASAGDNQPREWDFHVEDFMPERMALNLTPQAAPVAPDADVTFGVSGAYLYGAPASGNQLQGKLFLRPLRDAVAALPGFQFGDIVEENLSRSLDEVQLTLDEKGHGEVTTSSQWQDSHSPLQVVLQASLLESGGRPVTRTVKQPIWPAEALPGIRPQFTLKDVYDYRTDTTVKQPVVDENSNAAFDIVYADVKGEKKAISGLQVRLIRERRDYYWNWSDSEGWQSQFDQKDLQEGEESLDLQAGQIGKVSFPVEWGSYRLEVKGPDDVVSSVRFWAGYSWQDNSEGAGAARPDRVTMKLDKPSYKPGDTIRLHIAAPAAGKGYAMVESSEGPLWWQEIDVPAEGMDLSIPVDKTWNRHDLYLSTLVVRPGDKSRSATPKRAVGLLHLPLGDENRRLTLALEAPDKMRPNQPLTVKVKASVKEGEAPKRVNVLLSAVDSGVLNITDYATPDPWNAFFGQKRYGADIYDIYGQVIEGQGRVASLRFGGDGDELKRGGKPPVNHVTIVAQQAQPVVLNDQGEGTVTLPIGDFNGELRVMAQAWTADDFGSSEDKVVVAAPVIAELNTPRFLASGDTTRLALDLSNLTDKPQTLQVHLTASGLVTLTDGQLPPVQLAPGARSTLFIPVSALAGFGDGQVNATISGLSLPGETFAPLQKQWKIGVRPAYPAQTVNSGAVLQPGESWQPPAAQSQGFAPQTLQGQLLLSGKPPLNLARYIRELKAYPYGCLEQTASGLFPSLYTSAAQLKALGISGDSDEKRRAAIDVGISRLLQMQLENGGFALWDREGPEEYWLTAYAMDFLVRASEQGYSVPVNAINKGNERLLRYLQEPGLMTVRYSDDAQASRFAAQAYAALVLARQQKAPLGALREIWSRHDQARSGLPLLQLGIALKTMGDAPRGDAALKLAVATPRQDENRWLGDYGSPLRDNALKLALLEENKLLPEVQNQLLSTLSEEAYGQRWLSTQETNALFLAGRTLADLPGSWQAQTSLQAEPLAGDKAQTRNLDGDRLAALQVSNTGSQ

SEQ ID NO: 604 - protein, 1423 aa, Klebsiella pneumoniae 6258
VTNCIRLIGRGVRRMKPFRLAALSLALLTAFSLTGCDDSGTPQASAPAPAADSNPGATAKPDRAQLAALAEKSQGKALTLLDASEVQLDGAATLVLTFSVPLQPDQDFSRSVHLVDKKSGKVDGAWELAPNLKELRLRHLEPKRELIVSVDPTLTALNKATLDKPFEKTLTTRDIAPSVGFASRGSLLPGNVVAGLPVMALNVDNVDVNFFRIKPESLSAFVSQWEYRNSLSNWESDELLKMADLVYSGRFDLNPARNTREKLLLPLSDIKPLQQPGVYVAVMNPAGRYSYSNAATLFTLSDIGVSAHRYHNRLDVFTQSLENGAAQSGIEVQLLNAKGQTLAEAKSDSQGHVTLQTDKEAALLLARKEGQTTLLDLKLPALDLAEFSIAGAPGFSKQFFMFGPRDLYRPGETVILNALLRDSDGKPLAEQPVKLEVVQPDGQVIRSVMSKPVNGLYQFTYPLDSGAATGMWHIRASAGDNQPREWDFHVEDFMPERMALNLTPQAAPVAPDADVTFGVSGAYLYGAPASGNQLQGKLFLRPLRDAVAALPGFQFGDIAEENLSRSLDEVQLTLDEKGHGEVTTSSQWQDSHSPLQVVLQASLLESGGRPVTRTVKQPIWPAEALPGIRPQFTLKDVYDYRTDTTVKQPVVDENSNAAFDIVYADVKGEKKAISGLQVRLIRERRDYYWNWSDSEGWQSQFDQKDLQEGEESLDLQAGQIGKVSFPVEWGSYRLEVKGPDDVVSSVRFWAGYSWQDNSEGAGAARPDRVTMKLDKPSYKPGDTIRLHIAAPAAGKGYAMVESSEGPLWWQEIDVPAEGMDLSIPVDKTWNRHDLYLSTLVVRPGDKSRSATPKRAVGLLHLPLGDENRRLTLALEAPDKMRPNQPLTVKVKASVKEGEAPKRVNVLLSAVDSGVLNITDYATPDPWNAFFGQKRYGADIYDIYGQVIEGQGRVASLRFGGDGDELKRGGKPPVNHVTIVAQQAQPVVLNDQGEGTVTLPIGDFNGELRVMAQAWTADDFGSSEDKVVVAAPVIAELNTPRFLASGDTTRLALDLSNLTDKPQTLQVHLTASGLVTLTDGQLPPVQLAPGARSTLFIPVSALAGFGDGQVNATISGLSLPGETFAPLQKQWKIGVRPAYPAQTVNSGAVLQPGESWQPPAAQSQGFAPQTLQGQLLLSGKPPLNLARYIRELKAYPYGCLEQTASGLFPSLYTSAAQLKALGISGDSDEKRRAAIDVGISRLLQMQLENGGFALWDREGPEEYWLTAYAMDFLVRASEQGYSVPVNAINKGNERLLRYLQEPGLMTVRYSDDAQASRFAAQAYAALVLARQQKAPLGALREIWSRHDQARSGLPLLQLGIALKTMGDAPRGDAALKLAVATPRQDENRWLGDYGSPLRDNALKLALLEENKLLPEVQNQLLSTL

SEQ ID NO: 605 - protein, 1491 aa, Klebsiella pneumoniae 6168
VTNCIRLIGRGVRRMKPFRLAALSLALLTAFSLTGCDDSGTPQASAPAPAADSNPGATAKPDRAQLAALAEKSQGKALTLLDASEVQLDGAATLVLTFSVPLQPDQDFSRSVHLVDKKSGKVDGAWELAPNLKELRLRHLEPKRELIVSVDPTLTALNKATLDKPFEKTLTTRDIAPSVGFASRGSLLPGNVVAGLPVMALNVDNVDVNFFRIKPESLSAFVSQWEYRNSLSNWESDELLKMADLVYSGRFDLNPARNTREKLLLPLSDIKPLQQPGVYVAVMNPAGRYSYSNAATLFTLSDIGVSAHRYHNRLDVFTQSLENGAAQSGIEVQLLNAKGQTLAEAKSDSQGHVTLQTDKEAALLLARKEGQTTLLDLKLPALDLAEFSIAGAPGFSKQFFMFGPRDLYRPGETVILNALLRDSDGKPLAEQPVKLEVVQPDGQVIRSVMSKPVNGLYQFTYPLDSGAATGMWHIRASAGDNQPREWDFHVEDFMPERMALNLTPQAAPVAPDADVTFGVSGAYLYGAPASGNQLQGKLFLRPLRDAVAALPGFQFGDIAEENLSRSLDEVQLTLDEKGHGEVTTSSQWQDSHSPLQVVLQASLLESGGRPVTRTVKQPIWPAEALPGIRPQFTLKDVYDYRTDTTVKQPVVDENSNAAFDIVYADVKGEKKAISGLQVRLIRERRDYYWNWSDSEGWQSQFDQKDLQESEESLDLQAGQIGKVSFPVEWGSYRLEVKGPDDVVSSVRFWAGYSWQDNSEGAGAARPDRVTMKLDKPGYKPGDTIRLHIAAPAAGKGYAMVESSEGPLWWQEIDVPAEGMDLSIPVDKTWNRHDLYLSTLVVRPGDKSRSATPKRAVGLLHLPLGDENRRLTLALEAPDKIRPNQPLTVKVKASVKEGEAPKQVNVLLSAVDSGVLNITDYATPDPWNAFFGQKRYGADIYDIYGQVIEGQGRVASLRFGGDGDELKRGGKPPVNHVTIVAQQAQPVVLNDQGEGTVTLPIGDFNGELRVMAQAWTADDFGSSEDKVVVAAPVIAELNTPRFLASGDTTRLALDLSNLTDKPQTLQVHLTASGLVTLTEGQLPPVQLAPGARSTLFIPVSALAGFGDGQVNATISGLSLPGETFAPLQKQWKIGVRPAYPAQTVNSGAVLQPGESWQPPAAQSQGFAPQTLQGQLLLSGKPPLNLARYIRELKAYPYGCLEQTASGLFPSLYTSAAQLKALGISGDSDEKRRAAIDVGISRLLQMQLENGGFALWDREGPEEYWLTAYAMDFLVRASEQGYSVPVNAINKGNERLLRYLQEPGLMTVRYSDDAQASRFAAQAYAALVLARQQKAPLGALREIWSRHDQARSGLPLLQLGIALKTMGDAPRGDAALKLAVATPRQDENRWLGDYGSPLRDNALKLALLEENKLLPEVQNQLLSTLSEEAYGQRWLSTQETNALFLAGRTLADLPGSWQAQTSLQAEPLAGDKAQTRNLDGDRLAALQVSNTGS

SEQ ID NO: 606 - protein, 1489 aa, Klebsiella pneumoniae i256/94
VTNCIRLIGRGVRRMKPFRLAALSLALLTAFSLTGCDDSGTPQASAPAPAADSNPGATAKPDRAQLAALAEKSQGKALTLLDASEVQLDGAATLVLTFSVPLQPDQDFSRSVHLVDKKSGKVDGAWELAPNLKELRLRHLEPKRELIVSVDPTLTALNKATLDKPFEKTLTTRDIAPSVGFASRGSLLPGNVVAGLPVMALNVDNVDVNFFRIKPESLSAFVSQWEYRNSLSNWESDELLKMADLVYTGRFDLNPARNTREKLLLPLSDIKPLQQPGVYVAVMNPAGRYSYSNAATLFTLSDIGVSAHRYHNRLDVFTQSLENGAAQSGIEVQLLNAKGQTLAEAKSDSQGHVTLQTDKEAALLLARKEGQTTLLDLKLPALDLAEFSIAGAPGFSKQFFMFGPRDLYRPGETVILNALLRDSDGKPLAEQPVKLEVVQPDGQVIRSVMSKPVNGLYQFTYPLDSGAATGMWHIRASAGDNQPREWDFHVEDFMPERMALNLTPQAAPVAPDADVTFGVSGAYLYGAPASGNQLQGKLFLRPLRDAVAALPGFQFGDIAEENLSRSLDEVQLTLDEKGHGEVTTSSQWQDSHSPLQVVLQASLLESGGRPVTRTVKQPIWPAEALPGIRPQFTLKDVYDYRTDTTVKQPVVDENSNAAFDIVYADVKGEKKAISGLQVRLIRERRDYYWNWSDSEGWQSQFDQKDLQEGEESLDLQAGQIGKVSFPVEWGSYRLEVKGPDDVVSSVRFWAGYSWQDNSEGAGAARPDRVTMKLDKPSYKPGDTIRLHIAAPAAGKGYAMVESSEGPLWWQEIDVPAEGMDLSIPVDKTWNRHDLYLSTLVVRPGDKSRSATPKRAVGLLHLPLGDENRRLTLALEAPDKMRPNQPLTVKVKASVKEGEAPKRVNVLLSAVDSGALNITDYATPDPWNAFFGQKRYGADIYDIYGQVIEGQGRVASLRFGGDGDELKRGGKPPVNHVTIVAQQAQPVVLNDQGEGTVTLPIGDFNGELRVMAQAWTADDFGSSEDKVVVAAPVIAELNTPRFLASGDTTRLALDLSNLTDKPQTLQVHLTASGLVTLTDGQLPPVQLAPGARSTLFIPVSALAGFGDGQVNATISGLSLPGETFAPLQKQWKIGVRPAYPAQTVNSGAVLQPGESWQPPAAQSQGFAPQTLQGQLLLSGKPPLNLARYIRELKAYPYGCLEQTASGLFPSLYTSAAQLKALGISGDSDEKRRAAIDVGISRLLQMQLENGGFALWDREGPEEYWLTAYAMDFLVRASEQGYSVPVNAINKGNERLLRYLQEPGLMTVRYSDDAQASRFAAQAYAALVLARQQKAPLGALREIWSRHDQARSGLPLLQLGIALKTMGDAPRGDAALKLAVATPRQDENRWLGDYGSPLRDNALKLALLEENKLLPEVQNQLLSTLSEEAYGQRWLSTQETNALFLAGRTLADLPGSWQAKTSLQAEPLAGDKAQTRNLDGDRLAALQVSNT

SEQ ID NO: 607 - protein, 1492 aa, Klebsiella pneumoniae 7749
VTNCIRLIGRGVRRMKPFRLAALSLALLTAFSLTGCDDSGTPQASAPAPAADSNPGATAKPDRAQLAALAEKSQGKALTLLDASEVQLDGAATLVLTFSVPLQPDQDFSRSVHLVDKKSGKVDGAWELAPNLKELRLRHLEPKRELIVSVDPTLTALNKATLDKPFEKTLTTRDIAPSVGFASRGSLLPGNVVAGLPVMALNVDNVDVNFFRIKPESLSAFVSQWEYRNSLSNWESDELLKMADLVYSGRFDLNPARNTREKLLLPLSDIKPLQQPGVYVAVMNPAGRYSYSNAATLFTLSDIGVSAHRYHNRLDVFTQSLENGAAQSGIEVQLLNAKGQTLAEAKSDSQGHVTLQTDKEAALLLARKEGQTTLLDLKLPALDLAEFSIAGAPGFSKQFFMFGPRDLYRPGETVILNALLRDSDGKPLAEQPMKLEVVQPDGQVIRSVMSKPVNGLYQFTYPLDSGAATGMWHIRASAGDNQPREWDFHVEDFMPERMALNLTPQAAPVAPDADVTFGVSGAYLYGAPASGNQLQGKLFLRPLRDAIAALPGFQFGDIAEENLSRSLDEVQLTLDEKGHGEVTTSSQWQDSHSPLQVVLQASLLESGGRPVTRTVKQPIWPAEALPGIRPQFTLKDVYDYRTDTTMKQPVVDENSNAAFDIVYADVKGEKKATSGLQVRLIRERRDYYWNWSDSEGWQSQFDQKDLLEGEESLDLQAGQIGKVSFPVEWGSYRLEVKGPDDVVSSVRFWAGYSWQDNSEGAGAARPDRVTMKLDKPSYKPGDTIRLHIAAPAAGKGYAMVESSEGPLWWQEIDVPAEGMDLSIPVDKTWNRHDLYLSTLVVRPGDKSRSATPKRAVGLLHLPLGDENRRLTLALEAPDKMRPNQPLTVKVKASVKEGEAPKQVNVLLSAVDSGVLNITDYATPDPWNAFFGQKRYGADIYDIYGQVIEGQGRVASLRFGGDGDELKRGGKPPVNHVTIVAQQAQPVVLNDQGEGTVTLPIGDFNGELRVMAQAWTADDFGSSEDKVVVAAPVIAELNTPRFLASGDTTRLALDLSNLTDKPQTLQVHLTASGLVTLTDGQLPPVQLAPGARSTLFIPVSALAGFGDGQVNATISGLSLPGETFAPLQKQWKIGVRPAYPAQTVNSGAVLQPGENWQPPAAQSQGFAPQTQQGQLLLSGKPPLNLARYIRELKAYPYGCLEQTASGLFPSLYTSAAQLKALGISGDSDEKRRAAIDVGISRLLQMQLENGGFALWDREGPEEYWLTAYAMDFLVRASEQGYSVPVNAINKGNERLLRYLQEPGLMTVRYSDDAQASRFAAQAYAALVLARQQKAPLGALREIWSRHDQARSGLPLLQLGIALKTMGDAPRGDAALKLAVATPRQDENRWLGDYGSPLRDNALKLALLEENKLLPEVQNQLLSTLSEEAYGQRWLSTQETNALFLAGRTLADLPGSWQAKTSLQAEPLAGDKAQTRNLDGDRLAALQVSNTGSQ

SEQ ID NO: 608 - protein, 1492 aa, Klebsiella pneumoniae 2482
VTNSIRLIGRGVRRMKPFRLAALSLALLTAFSLTGCDDSGTPQASAPAPAADSNPGATAKPDRAQLAALAEKSQGKALTLLDASEVQLDGAATLVLTFSVPLQPDQDFSRSVHLVDKKSGKVDGAWELAPNLKELRLRHLEPKRELIVSVDPTLTALNKATLDKPFEKTLTTRDIAPSVGFASRGSLLPGNVVAGLPVMALNVDNVDVNFFRIKPESLSAFVSQWEYRNSLSNWESDELLKMADLVYTGRFDLNPARNTREKLLLPLSDIKPLQQPGVYVAVMNPAGRYSYSNAATLFTLSDIGVSAHRYHNRLDVFTQSLENGGAQSGIEVQLLNAKGQTLAEAKSDSQGHVTLQTDKEAALLLARKEGQTTLLDLKLPALDLAEFSIAGAPGFSKQFFMFGPRDLYRPGETVILNALLRDSDGKPLAEQPVKLEVVQPDGQVIRSVMSKPVNGLYQFTYPLDSGAATGMWHIRASAGDNQPREWDFHVEDFMPERMALNLTPQAAPVAPDADVTFGVSGAYLYGAPASGNQLQGKLFLRPLRDAVAALPGFQFGDIAEENLSRSLDEVQLTLDEKGHGEVTTSSQWQDSHSPLQVVLQASLLESGGRPVTRTVKQPIWPAEALPGIRPQFTLKDVYDYRTDTTVKQPVVDENSNAAFDIVYADVKGEKKAISGLQVRLIRERRDYYWNWSDSEGWQSQFDQKDLQEGEESLDLQAGQIGKVSFPVEWGSYRLEVKGPDDVVSSVRFWAGYSWQDNSEGAGAARPDRVTMKLDKPSYKPGDTIRLHIAAPAAGKGYAMVESSEGPLWWQEIDVPAEGMDLSIPVDKTWNRHDLYLSTLVVRPGDKSRSATPKRAVGLLHLPLGDENRRLTLALEAPDKMRPNQPLTVKVKASVKEGEAPKQVNVLLSAVDSGVLNITDYATPDPWNAFFGQKRYGADIYDIYGQVIEGQGRVASLRFGGDGDELKRGGKPPVNHVTIVAQQAQPVVLNDQGEGTVTLPIGDFNGELRVMAQAWTADDFGSSEDKVVVAAPVIAELNTPRFLASGDTTRLALDLSNLTDKPQTLQVHLTASGLVTLTDGQLPPVQLAPGARSTLFIPVSALAGFGDGQVNATISGLSLPGETFAPLQKQWKIGVRPAYPAQTVNSGAVLQPGESWQPPAAQSQGFAPQTLQGQLLLSGKPPLNLARYIRELKAYPYGCLEQTASGLFPSLYTSAAQLKALGISGDSDEKRRAAIDVGISRLLQMQLENGGFALWDREGPEEYWLTAYAMDFLVRASEQGYSVPVNAINKGNERLLRYLQEPGLMTVRYSDDAQASRFAAQAYAALVLARQQKAPLGALREIWSRHDQARSGLPLLQLGIALKTMGDAPRGDAALKLAVATPRQDENRWLGDYGSPLRDNALKLALLEENKLLPEVQNQLLSTLSEEAYGQRWLSTQDTNALFLAGRTLADLPGSWQAQTSLQAEPLAGDKAQTRNLDGDRLAALQVSNTGSQ

SEQ ID NO: 609 - protein, 1492 aa, Klebsiella pneumoniae 5281
VTNCIRLIGRGVRRMKPFRLAALSLALLTAFSLTGCDDSGTPQASAPAPAADSNPGATAKPDRAQLAALAEKSQGKALTLLDASEVQLDGAATLVLTFSVPLQPDQDFSRSVHLVDKKSGKVDGAWELAPNLKELRLRHLEPKRELIVSVDPTLTALNKATLDKPFEKTLTTRDIAPSVGFASRGSLLPGNVVAGLPVMALNVDNVDVNFFRIKPESLSAFVSQWEYRNSLSNWESDELLKMADLVYSGRFDLNPARNTREKLLLPLSDIKPLQQPGVYVAVMNPAGRYSYSNAATLFTLSDIGVSAHRYHNRLDVFTQSLENGAAQSGIEVQLLNAKGQTLAEAKSDSQGHVTLQTDKEAALLLARKEGQTTLLDLKLPALDLAEFSIAGAPGFSKQFFMFGPRDLYRPGETVILNALLRDSDGKPLAEQPVKLEVVQPDGQVIRSVMSKPVNGLYQFTYPLDSGAATGMWHIRASAGDNQPREWDFHVEDFMPERMALNLTPQAAPVAPDADVTFGVSGAYLYGAPASGNQLQGKLFLRPLRDAVAALPGFQFGDIAEENLSRSLDEVQLTLDEKGHGEVTTSSQWQDSHSPLQVVLQASLLESGGRPVTRTVKQPIWPAEALPGIRPQFTLKDVYDYRTDTTVKQPVVDENSNAAFDIVYADVKGEKKAISGLQVRLIRERRDYYWNWSDSEGWQSQFDQKDLQEGEESLDLQAGQIGKVSFPVEWGSYRLEVKGPDDVVSSVRFWAGYSWQDNSEGAGAARPDRVTMKLDKPSYKPGDTIRLHIAAPAAGKGYAMVESSEGPLWWQEIDVPAEGMDLSIPVDKAWNRHDLYLSTLVVRPGDKSRSATPKRAVGLLHLPLGDENRRLTLALEAPDKIRPNQPLTVKVKASVKEGEAPKQVNVLLSAVDSGVLNITDYATPDPWNAFFGQKRYGADIYDIYGQVIEGQGRVASLRFGGDGDELKRGGKPPVNHVTIVAQQAQPVVLNDQGEGTVTLPIGDFNGELRVMAQAWTADDFGSSEDKVVVAAPVIAELNTPRFLASGDTTRLALDLSNLTDKPQTLQVHLTASGLVTLTDGQLPPVQLAPGARSTLFIPVSALAGFGDGQVNATISGLSLPGETFAPLQKQWKIGVRPAYPAQTVNSGAVLQPGESWQPPAAQSQGFAPQTLQGQLLLSGKPPLNLARYIRELKAYPYGCLEQTASGLFPSLYTSAAQLKALGISGDSDEKRRAAIDVGISRLLQMQLENGGFALWDREGPEEYWLTAYAMDFLVRASEQGYSVPVNAINKGNERLLRYLQEPGLMTVRYSDDAQASRFAAQAYAALVLARQQKAPLGALREIWSRHDQARSGLPLLQLGIALKTMGDAPRGDAALKLAVATPRQDENRWLGDYGSPLRDNALKLALLEENKLLPEVQNQLLSTLSEEAYGQRWLSTQDTNALFLAGRTLADLPGSWQAQTSLQAEPLAGDKAQTRNLDGDRLAALQVSNSDSQ

SEQ ID NO: 610 - protein, 1492 aa, Klebsiella pneumoniae i224/94
VTNCIRLIGRGVRRMKPFRLAALSLALLTAFSLTGCDDSGTPQASAPAPAADSNPGATAKPDRAQLAALAEKSQGKALTLLDASEVQLDGAATLVLTFSVPLQPDQDFSRSVHLVDKKSGKVDGAWELAPNLKELRLRHLEPKRELIVSVDPTLTALNKATLDKPFEKTLTTRDIAPSVGFASRGSLLPGNVVAGLPVMALNVDNVDVNFFRIKPESLSAFVSQWEYRNSLSNWESDELLKMADLVYTGRFDLNPARNTREKLLLPLSDIKPLQQPGVYVAVMNPAGRYSYSNAATLFTLSDIGVSAHRYHNRLDVFTQSLENGAAQSGIEVQLLNAKGQTLAEAKSDSQGHVTLQTDKEAALLLARKEGQTTLLDLKLPALDLAEFSIAGAPGFSKQFFMFGPRDLYRPGETVILNALLRDSDGKPLAEQPVKLEVVQPDGQVIRSVMSKPVNGLYQFTYPLDSGAATGMWHIRASAGDNQPREWDFHVEDFMPERMALNLTPQAAPVAPDADVTFGVSGAYLYGAPASGNQLQGKLFLRPLRDAVAALPGFQFGDIAEENLSRSLDEVQLTLDEKGHGEVTTSSQWQDSHSPLQVVLQASLLESGGRPVTRTVKQPIWPAEALPGIRPQFTLKDVYDYRTDTTVKQPVVDENSNAAFDIVYADVKGEKKAISGLQVRLIRERRDYYWNWSDSEGWQSQFDQKDLQEGEESLDLQAGQIGKVSFPVEWGSYRLEVKGPDDVVSSVRFWAGYSWQDNSEGAGAARPDRVTMKLDKPSYKPGDTIRLHIAAPAAGKGYAMVESSEGPLWWQEIDVPAEGMDLSIPVDKTWNRHDLYLSTLVVRPGDKSRSATPKRAVGLLHLPLGDENRRLTLALEAPDKMRPNQPLTVKVKASVKEGEAPKQVNVLLSAVDSGVLNITDYATPDPWNAFFGQKRYGADIYDIYGQVIEGQGRVASLRFGGDGDELKRGGKPPVNHVTIVAQQAQPVVLNDQGEGTVTLPIGDFNGELRVMAQAWTADDFGSSEDKVVVAAPVIAELNTPRFLASGDTTRLALDLSNLTDKPQTLQVHLTASGLVTLTDGQLPPVQLAPGARSTLFIPVSALAGFGDGQVNATISGLSLPGETFAPLQKQWKIGVRPAYPAQTVNSGAVLQPGESWQPPAAQSQGFAPQTLQGQLLLSGKPPLNLARYIRELKAYPYGCLEQTASGLFPSLYTSAAQLKALGISGDSDEKRRAAIDVGISRLLQMQLENGGFALWNREEPEEYWLTAYAMDFLVRASEQGYSVPVNAINKGNERLLRYLQEPGLMTVRYSDDAQASRFAAQAYAALVLARQQKAPLGALREIWSRHDQARSGLPLLQLGIALKTMGDAPRGDAALKLAIATPRQDENRWLGDYGSPLRDNALKLALLEENKLLPEVQNQLLSTLSEEAYGQRWLSTQETNALFLAGRTLADLPGSWQAQTSLQAEPLAGDKAQTRNLDGDRLAALQVSNTGSQ

SEQ ID NO: 611 - protein, 1487 aa, Klebsiella pneumoniae i221/94
VTNSIRLIGRGVRRMKPFRLAALSLALLTAFSLTGCDDSGTPQASAPAPAADSNPGATAKPDRAQLAALAEKSQGKALTLLDASEVQLDGAATLVLTFSVPLQPDQDFSRSVHLVDKKSGKVDGAWELAPNLKELRLRHLEPKRELIVSVDPTLTALNKATLDKPFEKTLTTRDIAPSVGFASRGSLLPGNVVAGLPVMALNVDNVDVNFFRIKPESLSAFVSQWEYRNSLSNWESDELLKMADLVYSGRFDLNPARNTREKLLLPLSDIKQLQQPGVYVAVMNPAGRYSYSNAATLFTLSDIGVSAHRYHNRLDVFTQSLENGAAQSGIEVQLLNAKGQTLAEAKSDSQGHVTLQTDKEAALLLARKEGQTTLLDLKLPALDLAEFSIAGAPGFSKQFFMFGPRDLYRPGETVILNALLRDSDGKPLAEQPVKLEVVQPDGQVIRSVMSKPVNGLYQFTYPLDSGAATGMWHIRASAGDNQPREWDFHVEDFMPERMALNLTPQAAPVAPDADVTFGVSGAYLYGAPASGNQLQGKLFLRPLRDAVAALPGFQFGDIAEENLSRSLDEVQLTLDEKGHGEVTTSSQWQDSHSPLQVVLQASLLESGGRPVTRTVKQPIWPAEALPGIRPQFTLKDVYDYRTDTTVKQPVVDENSNAAFDIVYADVKGEKKAISGLQVRLIRERRDYYWNWSDSEGWQSQFDQKDLQEGEESLDLQAGQIGKVSFPVEWGSYRLEVKGPDDVVSSVRFWAGYSWQDNSEGAGAARPDRVTMKLDKPSYKPGDTIRLHIAAPAAGKGYAMVESSEGPLWWQEIDVPAEGMDLSIPVDKTWNRHDLYLSTLVVRPGDKSRSATPKRAVGLLHLPLGDENRRLTLALEAPDKMRPNQPLTVKVKASVKEGEAPKQVNVLLSAVDSGVLNITDYATPDPWNAFFGQKRYGADIYDIYGQVIEGQGRVASLRFGGDGDELKRGGKPPVNHVTIVAQQAQPVVLNDQGEGTVTLPIGDFNGELRVMAQAWTADDFGSSEDKVVVAAPVIAELNTPRFLASGDTTRLALDLSNLTDKPQTLQVHLTASGLVTLTDGQLPPVQLAPGARSTLFIPVSALAGFGDGQVNATISGLSLPGETFAPLQKQWKIGVRPAYPAQTVNSGAVLQPGESWQPPAAQSQGFAPQTLQGQLLLSGKPPLNLARYIRELKAYPYGCLEQTASGLFPSLYTSAAQLKALGISGDSDEKRRAAIDVGISRLLQMQLENGGFALWDREGPEEYWLTAYAMDFLVRASEQGYSVPVNAINKGNERLLRYLQEPGLMTVRYSDDAQASRFAAQAYAALVLARQQKAPLGALREIWSRHDQARSGLPLLQLGIALKTMGDAPRGDAALKLAIATPRQDENRWLGDYGSPLRDNALKLALLEENKLLPEVQNQLLSTLSEEAYGQRWLSTQETNALFLAGRTLADLPGSWQAKTSLQAEPLAGDKAQTRNLDGDRLAALQVS

SEQ ID NO: 612 - protein, 1489 aa, Klebsiella pneumoniae 5710/52
VTNCIRLIGRGVRRMKPFRLAALSLALLTAFSLTGCDDSGTPQASAPAPAADSNPGATAKPDRAQLAALAEKSQGKALTLLDASEVQLDGAATLVLTFSVPLQPDQDFSRSVHLVDKKSGKVDGAWELAPNLKELRLRHLEPKRELIVSVDPTLTALNKATLDKPFEKTLTTRDIAPSVGFASRGSLLPGNVVAGLPVMALNVDNVDVNFFRIKPESLSAFVSQWEYRNSLSNWESDELLKMADLVYTGRFDLNPARNTREKLLLPLSDIKPLQQPGVYVAVMNPAGRYSYSNAATLFTLSDIGVSAHRYHNRLDVFTQSLENGAAQSGIEVQLLNAKGQTLAEAKSDSQGHVTLQTDKEAALLLARKEGQTTLLDLKLPALDLAEFSIAGAPGFSKQFFMFGPRDLYRPGETVILNALLRDSDGKPLAEQPVKLEVVQPDGQVIRSVMSKPVNGLYQFTYPLDSGAATGMWHIRASAGDNQPREWDFHVEDFMPERMALNLTPQAAPVAPDADVTFGVSGAYLYGAPASGNQLQGKLFLRPLRDAVAALPGFQFGDIAEENLSRSLDEVQLTLDEKGHGEVTTSSQWQDSHSPLQVVLQASLLESGGRPVTRTVKQPIWPAEALPGIRPQFTLKDVYDYRTDTTVKQPVVDENSNAAFDIVYADVKGEKKAISGLQVRLIRERRDYYWNWSDSEGWQSQFDQKDLQEGEESLDLQAGQIGKVSFPVEWGSYRLEVKGPDDVVSSVRFWAGYSWQDNSESAGAARPDRVTMKLDKPSYKPGDTIRLHIAAPAAGKGYAMVESSEGPLWWQEIDVPAEGMDLSIPVDKTWNRHDLYLSTLVVRPGDKSRSATPKRAVGLLHLPLGDENRRLTLALEAPDKMRPNQPLTVKVKASVKEGEAPKQVNVLLSAVDSGVLNITDYATPDPWNAFFGQKRYGADIYDIYGQVIEGQGRVASLRFGGDGDELKRGGKPPVNHVTIVAQQAQPVVLNDQGEGTVTLPIGDFNGELRVMAQAWTADDFGSSEDKVVVAAPVIAELNTPRFLASGDTTRLALDLSNLTDKPQTLQVHLTASGLVTLTEGQLPPVQLAPGARSTLFIPVSALAGFGDGQVNATISGLSLPGETFAPLQKQWKIGVRPAYPAQTVNSGAVLQPGESWQPPAAQSQGFAPQTLQGQLLLSGKPPLNLARYIRELKAYPYGCLEQTASGLFPSLYTSAAQLKALGISGDSDEKRRAAIDVGISRLLQMQLENGGFALWDREGPEEYWLTAYAMDFLVRASEQGYSVPVNAINKGNERLLRYLQEPGLMTVRYSDDAQASRFAAQAYAALVLARQQKAPLGALREIWSRHDQARSGLPLLQLGIALKTMGDAPRGDAALKLAVATPRQDENRWLGDYGSPLRDNALKLALLEENKLLPEVQNQLLSTLSEEAYGQRWLSTQETNALFLAGRTLADLPGSWQAKTSLQAEPLAGDKAQTRNLDGDRLAALQVSNT

SEQ ID NO: 613 - protein, 1490 aa, Klebsiella pneumoniae 5711/52
VTNSIRLIGRGVRRMKPFRLAALSLALLTAFSLTGCDDSGTPQASAPAPAADSNPGATAKPDRAQLAALAEKSQGKALTLLDASEVQLDGAATLVLTFSVPLQPDQDFSRSVHLVDKKSGKVDGAWELAPNLKELRLRHLEPKRELIVSVDPTLTALNKATLDKPFEKTLTTRDIAPSVGFASRGSLLPGNVVAGLPVMALNVDNVDVNFFRIKPESLSAFVSQWEYRNSLSNWESDELLKMADLVYSGRFDLNPARNTREKLLLPLSDIKPLQQPGVYVAVMNPAGRYSYSNAATLFTLSDIGVSAHRYHNRLDVFTQSLENGAAQSGIEVQLLNAKGQTLAEAKSDSQGHVTLQTDKEAALLLARKEGQTTLLDLKLPALDLAEFSIAGAPGFSKQFFMFGPRDLYRPGETVILNALLRDSDGKPLAEQPVKLEVVQPDGQVIRSVMSKPVNGLYQFTYPLDSGAATGMWHIRASAGDNQPREWDFHVEDFMPERMALNLTPQAAPVAPDADVTFGVSGAYLYGAPASGNQLQGKLFLRPLRDAVAALPGFQFGDIAEENLSRSLDEVQLTLDEKGHGEVTTSSQWQDSHSPLQVVLQASLLESGGRPVTRTVKQPIWPAEALPGIRPQFTLKDVYDYRTDTTVKQPVVDENSNAAFDIVYADVKGEKKAFSGLQVRLIRERRDYYWNWSDSEGWQSQFDQKDLQEGEESLDLQAGQIGKVSFPVEWGSYRLEVKGPDDVVSSVRFWAGYSWQDNSEGAGAARPDRVTMKLDKPSYKPGDTIRLHIAAPAAGKGYAMVESSEGPLWWQEIDVPAEGMDLSIPVDKTWNRHDLYLSTLVVRPGDKSRSATPKRAVGLLHLPLGDENRRLTLALEAPDKMRPNQPLTVKVKASVKEGEAPKQVNVLLSAVDSGVLNITDYATPDPWNAFFGQKRYGADIYDIYGQVIEGQGRVASLRFGGDGDELKRGGKPPVNHVTIVAQQAQPVVLNDQGEGTVTLPIGDFNGELRVMAQAWTADDFGSSEDKVVVAAPVIAELNTPRFLASGDTTRLALDLSNLTDQPQTLQVHLTASGLVTLTDGQLPPVQLAPGARSTLFIPVSALAGFGDGQVNATISGLSLPGETFAPLQKQWKIGVRPAYPAQTVNSGAVLQPGESWQPPAAQSQGFAPQTLQGQLLLSGKPPLNLARYIRELKAYPYGCLEQTASGLFPSLYTSAAQLKALGISGDSDEKRRAAIDVGISRLLQMHLENGGFALWDKKGPEKYWLTAYPMDFLVRASEQGYSVPVNAINKGNERLLRYLQEPGLMTVRYSDDAQASRFAAQAYAALVLARQQKAPLGALREIWSRHDQARSGLPLLQLGIALKTMGDAPRGDPPLKLAVATPPQDENRWLGDYGSPLRDNALKLALLEENKLLPEVQTQLLSTLSEEAYGQRWLSTQETNALFLAGRTLADLPGSWQAQTSLQAEPLAGDKAQTRNLDGDRLAALQVSNTG

SEQ ID NO: 614 - protein, 1252 aa, Klebsiella pneumoniae NCTC8172
VTNCIRLIGRGVRRMKPFRLAALSLALLTAFSLTGCDDSGTPQASAPAPAADSNPGATAKPDRAQLAALAEKSQGKALTLLDASEVQLDGAATLVLTFSVPLQPDQDFSRSVHLVDKKSGKVDGAWELAPNLKELRLRHLEPKRELIVSVDPTLTALNKATLDKPFEKTLTTRDIAPSVGFASRGSLLPGNVVAGLPVMALNVDNVDVNFFRIKPESLSAFVSQWEYRNSLSNWESDELLKMADLVYTGRFDLNPARNTREKLLLPLSDIKPLQQPGVYVAVMNPAGRYSYSNAATLFTLSDIGVSAHRYHNRLDVFTQSLENGAAQSGIEVQLLNAKGQTLAEAKSDSQGHVTLQTDKEAALLLARKEGQTTLLDLKLPALDLAEFSIAGAPGFSKQFFMFGPRDLYRPGETVILNALLRDSDGKPLAEQPVKLEVVQPDGQVIRSVMSKPVNGLYQFTYPLDSGAATGMWHIRASAGDNQPREWDFHVEDFMPERMALNLTPQAAPVAPDADVTFGVSGAYLYGAPASGNQLQGKLFLRPLRDAVAALPGFQFGDIAEENLSRSLDEVQLTLDEKGHGEVTTSSQWQDSHSPLQVVLQASLLESGGRPVTRTVKQPIWPAEALPGIRPQFTLKDVYDYRTDTTVKQPVVDENSNAAFDIVYADVKGEKKAISGLQVRLIRERRDYYWNWSDSEGWQSQFDQKDLQEDEESLDLQAGQIGKVSFPVEWGSYRLEVKGPDDVVSSVRFWAGYSWQDNSEGAGAARPDRVTMKLDKPSYKPGDTIRLHIAAPAAGKGYAMVESSEGPLWWQEIDVPAEGMDLSIPVDKTWNRHDLYLSTLVVRPGDKSRSATPKRAVGLLHLPLGDENRRLTLALEAPDKMRPNQPLTVKVKASVKEGEAPKRVNVLLSAVDSGVLNITDYATPDPWNAFFGQKRYGADIYDIYGQVIEGQGRVASLRFGGDGDELKRGGKPPVNHVTIVAQQAQPVVLNDQGEGTVTLPIGDFNGELRVMAQAWTADDFGSSEDKVVVAAPVIAELNTPRFLASGDTTRLALDLSNLTDKPQTLQVHLTASGLVTLTDGQLPPVQLAPGARSTLFIPVSALAGFGDGQVNATISGLSLPGETFAPLQKQWKIGVRPAYPAQTVNSGAVLQPGESWQPPAAQSQGFAPQTLQGQLLLSGKPPLNLARYIRELKAYPYGCLEQTASGLFPSLYTSAAQLKALGISGDSDEKRRAAIDVGISRLLQMQLENGGFA

SEQ ID NO: 615 - protein, 949 aa, Klebsiella pneumoniae 708
VTNCIRLIGRGVRRMKPFRLAALSLALLTAFSLTGCDDSGTPQASAPAPAADSNPGATAKPDRAQLAALAEKSQGKALTLLDASEVQLDGAATLVLTFSVPLQPDQDFSRSVHLVDKKSGKVDGAWELAPNLKELRLRHLEPKRELIVSVDPTLTALNKATLDKPFEKTLTTRDIAPSVGFASRGSLLPGNVVAGLPVMALNVDNVDVNFFRIKPESLSAFVSQWEYRNSLSNWESDELLKMADLVYSGRFDLNPARNTREKLLLPLSDIKPLQQPGVYVAVMNPAGRYSYSNAATLFTLSDIGVSAHRYHNRLDVFTQSLENGAAQSGIEVQLLNAKGQTLAEAKSDSQGHVTLQTDKEAALLLARKEGQTTLLDLKLPALDLAEFSIAGAPGFSKQFFMFGPRDLYRPGETVILNALLRDSDGKPLAEQPVKLEVVQPDGQVIRSVMSKPVNGLYQFTYPLDSGAATGMWHIRASAGDNQPREWDFHVEDFMPERMALNLTPQAAPVAPDADVTFGVSGAYLYGAPASGNQLQGKLFLRPLRDAVAALPGFQFGDIAEENLSRSLDEVQLTLDEKGHGEVTTSSQWQDSHSPLQVVLQASLLESGGRPVTRTVKQPIWPAEALPGIRPQFTLKDVYDYRTDTTVKQPVVDENSNAAFDIVYADVKGEKKAISGLQVRLIRERRDYYWNWSDSEGWQSQFDQKDLQEGEESLDLQAGQIGKVSFPVEWGSYRLEVKGPDDVVSSVRFWAGYSWQDNSEGAGAARPDRVTMKLDKPSYKPGDTIRLHIAAPAAGKGYAMVESSEGPLWWQEIDVPAEGMDLSIPVDKTWNRHDLYLSTLVVRPGDKSRSATPKRAVGLLHLPLGDENRRLTLALEAPDKMRPNQPLTVKVKASVKEGEAPKRVNVLLSAVDSGVLNITDYATPDPWNAFFGQKRYGADIYDIYGQVIEG

SEQ ID NO: 616 - protein, 1244 aa, Klebsiella pneumoniae Friedlaender204
VTNCIRLIGRGVRRMKPFRLAALSLALLTAFSLTGCDDSGTPQASAPAPAADSNPGATAKPDRAQLAALAEKSQGKALTLLDASEVQLDGAATLVLTFSVPLQPDQDFSRSVHLVDKKSGKVDGAWELAPNLKELRLRHLEPKRELIVSVDPTLTALNKATLDKPFEKTLTTRDIAPSVGFASRGSLLPGNVVAGLPVMALNVDNVDVNFFRIKPESLSAFVSQWEYRNSLSNWESDELLKMADLVYTGRFDLNPARNTREKLLLPLSDIKPLQQPGVYVAVMNPAGRYSYSNAATLFTLSDIGVSAHRYHNRLDVFTQSLENGAAQSGIEVQLLNAKGQTLAEAKSDSQGHVTLQTDKEAALLLARKEGQTTLLDLKLPALDLAEFSIAGAPGFSKQFFMFGPRDLYRPGETVILNALLRDSDGKPLAEQPVKLEVVQPDGQVIRSVMSKPVNGLYQFTYPLDSGAATGMWHIRASAGDNQPREWDFHVEDFMPERMALNLTPQAAPVAPDADVTFGVSGAYLYGAPASGNQLQGKLFLRPLRDAVAALPGFQFGDIAEENLSRSLDEVQLTLDEKGHGEVTTSSQWQDSHSPLQVVLQASLLESGGRPVTRTVKQPIWPAEALPGIRPQFTLKDVYDYLTDTTVKQPVVDENSNAAFDIVYADVKGEKKAISGLQVRLIRERRDYYWNWSDSEGWQSQFDQKDLQEGEESLDLQAGQIGKVSFPVEWGSYRLEVKGPDDVVSSVRFWAGYSWQDNSEGAGAARPDRVTMKLDKPSYKPGDTIRLHIAAPAAGKGYAMVESSEGPLWWQEIDVPAEGMDLSIPVDKTWNRHDLYLSTLVVRPGDKSRSATPKRAVGLLHLPLGDENRRLTLALEAPDKIRPNQPLTVKVKASVKEGEAPKQVNVLLSAVDSGVLNITDYATPDPWNAFFGQKRYGADIYDIYGQVIEGQGRVASLRFGGDGDELKRGGKPPVNHVTIVAQQAQPVVLNDQGEGTVTLPIGDFNGELRVMAQAWTADDFGSSEDKVVVAAPVIAELNTPRFLASGDTTRLALDLSNLTDKPQTLQVHLTASGLVTLSEGQLPPVQLAPGARSTLFIPVSALAGFGDGQVNATISGLSLPGETFAPLQKQWKIGVRPAYPAQTVNSGAALQPGESWQPPAAQSQGFAPQTLQGQLLLSGKPPLNLARYIRELKAYPYGCLEQTASGLFPSLYTSAAQLKALGISGDSDEKRRAAIDVGISRLLQM

SEQ ID NO: 617 - protein, 1474 aa, Klebsiella pneumoniae 5053
VTNCIRLIGRGVRRMKPFRLAALSLALLTAFSLTGCDDSGTPQASAPAPAADSNPGATAKPDRAQLAALAEKSQGKALTLLDASEVQLDGAATLVLTFSVPLQPDQDFSRSVHLVDKKSGKVDGAWELAPNLKELRLRHLEPKRELIVSVDPTLTALNKATLDKPFEKTLTTRDIAPSVGFASRGSLLPGNVVAGLPVMALNVDNVDVNFFRIKPESLSAFVSQWEYRNSLSNWESDELLKMADLVYTGRFDLNPARNTREKLLLPLSDIKPLQQPGVYVAVMNPAGRYSYSNAATLFTLSDIGVSAHRYHNRLDVFTQSLENGAVQSGIEVQLLNAKGQTLAEAKSDSQGHVTLQTDKEAALLLARKEGQTTLLDLKLPALDLAEFSIAGAPGFSKQFFMFGPRDLYRPGETVILNALLRDSDGKPLAEQPVKLEVVQPDGQVIRSVMSKPVNGLYQFTYPLDSGAATGMWHIRASAGDNQPREWDFHVEDFMPERMALNLTPQAAPVAPDADVTFGVSGAYLYGAPASGNQLQGKLFLRPLRDAVAALPGFQFGDIAEENLSRSLDEVQLTLDEKGHGEVTTSSQWQDSHSPLQVVLQASLLESGGRPVTRTVKQPIWPAEALPGIRPQFTLKDVYDYRTDTTVKQPVVDENSNAAFDIVYADVKGEKKAISGLQVRLIRERRDYYWNWSDSEGWQSQFDQKDLQESEESLDLQAGQIGKVSFPVEWGSYRLEVKGPDDVVSSVRFWAGYSWQDNSEGAGAARPDRVTMKLDKPGYKPGDTIRLHIAAPAAGKGYAMVESSEGPLWWQEIDVPAEGMDLSIPVDKTWNRHDLYLSTLVVRPGDKSRSATPKRAVGLLHLPLGDENRRLTLALEAPDKIRPNQPLTVKVKASVKEGEAPKQVNVLLSAVDSGVLNITDYATPDPWNAFFGQKRYGADIYDIYGQVIEGQGRVASLRFGGDGDELKRGGKPPVNHVTIVAQQAQPVVLNDQGEGTVTLPIGDFNGELRVMAQAWTADDFGSSEDKVVVAAPVIAELNTPRFLASGDTTRLALDLSNLTDKPQTLQVHLTASGLVTLTEGQLPPVQLAPGARSTLFIPVSALAGFGDGQVNATISGLSLPGETFAPLQKQWKIGVRPAYPAQTVNSGAVLQPGESWQPPAAQSQGFAPQTLQGQLLLCGKPPLNLARYIRELKAYPYGCLEQTASGLFPSLYTSAAQLKALGISGDSDEKRRAAIDVGISRLLQMQLENGGFALWDREGPEEYWLTAYAMDFLVRASEQGYSVPVNAINKGNERLLRYLQEPGLMTVRYSDDAQASRFAAQAYAALVLARQQKAPLGALREIWSRHDQARSGLPLLQLGIALKTMGDAPRGDAALKLAIATPRQDENRWLGDYGSPLRDNALKLALLEENKLLPEVQNQLLSTLSEEAYGQRWLSTQETNALFLAGRTLADLPGSWQAKTSLQAEPLAGDKAQTR

SEQ ID NO: 618 - protein, 245 aa, Klebsiella pneumoniae MGH78578; identical to SEQ ID NO: 195

SEQ ID NO: 619 - protein, 245 aa, Klebsiella pneumoniae A5054; identical to SEQ ID NO: 195

SEQ ID NO: 620 - protein, 245 aa, Klebsiella pneumoniae i252/94
VDGWQRAFVLHSRPWSETSLMLDVFTEESGRVRLVAKGARSKRSNLKGALQPFTPLLVRFGGRGEVKTLRSAEAVSLALPLSGITLYSGLYVNELISRVLEHETRFSELFFDYLHCIQALAGTSGSPEPALRRFELALLGHLGYGVDFLHCAGSGEPVDDTMTYRYREEKGFIASLVIDNNTFTGHHLKALASREFPDVDTLRAAKRFTRIALKPYLGGKPLKSRELFRQFMPARKARADNTNND

SEQ ID NO: 621 - protein, 245 aa, Klebsiella pneumoniae B5055; identical to SEQ ID NO: 195

SEQ ID NO: 622 - protein, 245 aa, Klebsiella pneumoniae i225/94; identical to SEQ ID NO: 195

SEQ ID NO: 623 - protein, 245 aa, Klebsiella pneumoniae D5050; identical to SEQ ID NO: 195

SEQ ID NO: 624 - protein, 245 aa, Klebsiella pneumoniae E5051; identical to SEQ ID NO: 195

SEQ ID NO: 625 - protein, 245 aa, Klebsiella pneumoniae Aerogenes4140; identical to SEQ ID NO: 195

SEQ ID NO: 626 - protein, 245 aa, Klebsiella pneumoniae 1015; identical to SEQ ID NO: 195

SEQ ID NO: 627 - protein, 245 aa, Klebsiella pneumoniae i262/94
VDGWQRAFVLHSRPWSETSLMLDVFTEESGRVRLVAKGARSKRSNLKGALQPFTPLLVRFGGRGEVKTLRSAEAVSLALPLSGITLYSGLYVNELISRVLEHETRFSELFFDYLHCIQALAGTSGSPEPALRRFELALLGHLGYGVDFLHCAGSGEPVDDTMTYRYREEKGFIASLVIDNNTFTGHHLKALASREFPDVDTLRAAKRFTRIALKPYLGGKPLKSRELFRQFMPSRKARADNTNND

SEQ ID NO: 628 - protein, 245 aa, Klebsiella pneumoniae 919; identical to SEQ ID NO: 195

SEQ ID NO: 629 - protein, 245 aa, Klebsiella pneumoniae 313; identical to SEQ ID NO: 195

SEQ ID NO: 630 - protein, 245 aa, Klebsiella pneumoniae 1470
VDGWQRAFVLHSRPWSETSLMLDVFTEESGRVRLVAKGARSKRSNLKGALQPFTPLLVRFGGRGEVKTLRSAEAVSLALPLSGITLYSGLYVNELISRVLEHETRFSELFFDYLHCIQALAGASGSPEPALRRFELALLGHLGYGVDFLHCAGSGEPVDDTMTYRYREEKGFIASLVIDNNTFTGHHLKALASREFPDVDTLRAAKRFTRIALKPYLGGKPLKSRELFRQFMPARKTRADNTNND

SEQ ID NO: 631 - protein, 245 aa, Klebsiella pneumoniae 1193; identical to SEQ ID NO: 195

SEQ ID NO: 632 - protein, 245 aa, Klebsiella pneumoniae Mich61; identical to SEQ ID NO: 195

SEQ ID NO: 633 - protein, 245 aa, Klebsiella pneumoniae 2069/49; identical to SEQ ID NO: 195

SEQ ID NO: 634 - protein, 245 aa, Klebsiella pneumoniae i243/94; identical to SEQ ID NO: 627

SEQ ID NO: 635 - protein, 245 aa, Klebsiella pneumoniae 2005/49; identical to SEQ ID NO: 195

SEQ ID NO: 636 - protein, 245 aa, Klebsiella pneumoniae 1754/49; identical to SEQ ID NO: 195

SEQ ID NO: 637 - protein, 245 aa, Klebsiella pneumoniae 1702/49; identical to SEQ ID NO: 195

SEQ ID NO: 638 - protein, 245 aa, Klebsiella pneumoniae i202/94
VDGWQRAFVLHSRPWSETSLMLDVFTEESGRVRLVAKGARSKRSNLKGALQPFTPLLVRFGGRGEVKTLRSAEAVSLALPLSGITLYSGLYVNELISRVLEHETRFSELFFDYLHCIQALAGASGSPEPALRRFELALLGHLGYGVDFLHCAGSGEPVDDTMTYRYREEKGFIASLVIDNNTFTGHHLKALASREFPDVDTLRAAKRFTRIALKPYLGGKPLKSRELFRQFMPARKARADNTKND

SEQ ID NO: 639 - protein, 245 aa, Klebsiella pneumoniae 1996/49; identical to SEQ ID NO: 195

SEQ ID NO: 640 - protein, 245 aa, Klebsiella pneumoniae 1680/49; identical to SEQ ID NO: 195

SEQ ID NO: 641 - protein, 245 aa, Klebsiella pneumoniae 2002/49; identical to SEQ ID NO: 195

SEQ ID NO: 642 - protein, 245 aa, Klebsiella pneumoniae 6613
VDGWQRAFVLHSRPWSETSLMLDVFTEESGRVRLVAKGARSKRSNLKGALQPFTPLLVRFGGRGEVKTLRSAEAVSLALPLSGITLYSGLYVNELISRVLEHETRFSELFFDYLHCIQALAGASGSPEPALRRFELALLGHLGYGVDFLHCAGSGEPVDDTMTYRYREEKGFIASLVIDNNTFTGHHLKALASREFPDVDTLRAAKRFTRIAMKPYLGGKPLKSRELFRQFMPARKARADNTNND

SEQ ID NO: 643 - protein, 245 aa, Klebsiella pneumoniae 5758; identical to SEQ ID NO: 642

SEQ ID NO: 644 - protein, 245 aa, Klebsiella pneumoniae 7824; identical to SEQ ID NO: 195

SEQ ID NO: 645 - protein, 245 aa, Klebsiella pneumoniae 6258
VDGWQRAFVLHSRPWSETSLMLDVFTEESGRVRLVAKGARSKRSNLKGALQPFTPLLVRFGGRGEVKTLRSAEAVSLALPLNGITLYSGLYVNELISRVLEHETRFSELFFDYLHCIQALAGASGSPEPALRRFELALLGHLGYGVDFLHCAGSGEPVDDTMTYRYREEKGFIASLVIDNNTFTGHHLKALASREFPDVDTLRAAKRFTRIALKPYLGGKPLKSRELFRQFMPARKARADNTNND

SEQ ID NO: 646 - protein, 245 aa, Klebsiella pneumoniae 6168; identical to SEQ ID NO: 195

SEQ ID NO: 647 - protein, 245 aa, Klebsiella pneumoniae i256/94
VDGWQRAFVLHSRPWSETSLMLDVFTEESGRVRLVAKGARSKRSNLKGALQSFTPLLVRFGGRGEVKTLRSAEAVSLALPLSGITLYSGLYVNELISRVLEHETRFSELFFDYLHCIQALAGASGSPEPALRRFELALLGHLGYGVDFLHCAGSGEPVDDTMTYRYREEKGFIASLVIDNNTFTGHHLKALASREFPDVDTLRAAKRFTRIALKPYLGGKPLKSRELFRQFMPARKARADNTNND

SEQ ID NO: 648 - protein, 245 aa, Klebsiella pneumoniae 7749; identical to SEQ ID NO: 195

SEQ ID NO: 649 - protein, 245 aa, Klebsiella pneumoniae 2482; identical to SEQ ID NO: 195

SEQ ID NO: 650 - protein, 245 aa, Klebsiella pneumoniae 5281; identical to SEQ ID NO: 195

SEQ ID NO: 651 - protein, 245 aa, Klebsiella pneumoniae i224/94; identical to SEQ ID NO: 195

SEQ ID NO: 652 - protein, 245 aa, Klebsiella pneumoniae 1756/51
VDGWQRAFVLHSRPWSETSLMLDVFTEESGRVRLVAKGARSKRSNLKGALQPFTPLLVRFGGRGEVKTLRSAEAVSLALPLSGITLYSGLYVNELISRVLEHETRFSELFFDYLHCIQALAGTSGSPEPALRRFELALLGHLGYGVDFLHCAGSGEPVDDTMTYRYREEKGFIASLVIDNNTFTGHHLKALASREFPDVDTLRAAKRFTRIALKPYLGGKPLKSRELFRQFMPSRKPRADNTNND

SEQ ID NO: 653 - protein, 245 aa, Klebsiella pneumoniae Stanley; identical to SEQ ID NO: 627

SEQ ID NO: 654 - protein, 245 aa, Klebsiella pneumoniae 3985/51; identical to SEQ ID NO: 645

SEQ ID NO: 655 - protein, 245 aa, Klebsiella pneumoniae i221/94; identical to SEQ ID NO: 195

SEQ ID NO: 656 - protein, 245 aa, Klebsiella pneumoniae 4463/52
VDGWQRAFVLHSRPWSETSLMLDVFTEESGRVRLVAKGARSKRSNLKGALQPFTPLLVRFGGRGEVKTLRSAEAVSLALPLSGITLYSGLYVNELISRVLEHETRFSELFFDYLHCIQALAGTSGSPEPALRRFELALLGHLGYGVDFLHCAGSGEPVDDTMTYRYREEKGFIASLVIDNNTFTGHHLKALASREFPDVDTLRAAKRFTRIALKPYLGGKPLKSRELFRQFMPARKARADNTKND

SEQ ID NO: 657 - protein, 245 aa, Klebsiella pneumoniae 5710/52; identical to SEQ ID NO: 642

SEQ ID NO: 658 - protein, 245 aa, Klebsiella pneumoniae 5711/52; identical to SEQ ID NO: 195

SEQ ID NO: 659 - protein, 245 aa, Klebsiella pneumoniae 5845/52; identical to SEQ ID NO: 195

SEQ ID NO: 660 - protein, 245 aa, Klebsiella pneumoniae NCTC8172; identical to SEQ ID NO: 195

SEQ ID NO: 661 - protein, 245 aa, Klebsiella pneumoniae 264-1
MEGWQRAFVLHSRPWSETSLMLDVFTEESGRVRLVAKGARSKRSNLKGALQPFTPLLLRFGGRGEVKTLRSAEAVSLALPLSGITLYSGLYVNELLSRVLEHETRFSELFFDYLHCIQSLAGASGSPEPALRRFELALLGHLGYGVDFLHCAGSGEAVDDAMTYRYREEKGFIASVVIDNNTFTGHHLKALASREFPDSDALRAAKRFTRIALKPYLGGKPLKSRELFRQFMPARAARADKTNND

SEQ ID NO: 662 - protein, 245 aa, Klebsiella pneumoniae 265-1
VEGWQRAFVLHSRPWSETSLMLDVFTEESGRVRLVAKGARSKRSSLKGAFQPFTPLLLRFGGRGEVKTLRSAEAVSLALPLSGITLYSGLYVNELLSRVLEHETRFSELFFDYLHCLQALAGASGTPEPALRRFELALLGHLGYGVDFLHCAGSGEAVSDTMTYRYREEKGFIASLVIDNNSFTGHHLKALANREFPDSDALRAAKRFTRIALKPYLGGKPLKSRELFRQFIPARAARADKTNNE

SEQ ID NO: 663 - protein, 246 aa, Klebsiella pneumoniae 889
VEGWQRAFVLHSRPWSETSLMLDVFTEESGRVRLVAKGARSKRSSLKGALQPFTPLLLRFGGRGEVKTLRSAEAVSLALPLSGITLYSGLYVNELLSRVLEHETRFSELFFDYLHCLQALAGASGTPEPALRRFELALLGHLGYGVDFLHCAGSGEAVSDTMTYRYREEKGFIASLVIDNNSFTGHHLKALANREFPDSDALRAAKRFTRIALKPYLGGKPLKSRELFRQFIPARAARADKTNNEQ

SEQ ID NO: 664 - protein, 245 aa, Klebsiella pneumoniae 708; identical to SEQ ID NO: 195

SEQ ID NO: 665 - protein, 245 aa, Klebsiella pneumoniae 370; identical to SEQ ID NO: 195

SEQ ID NO: 666 - protein, 245 aa, Klebsiella pneumoniae Friedlaender204; identical to SEQ ID NO: 195

SEQ ID NO: 667 - protein, 245 aa, Klebsiella pneumoniae 5053; identical to SEQ ID NO: 195

SEQ ID NO: 668 - protein, 248 aa, Klebsiella pneumoniae MGH78578; identical to SEQ ID NO: 263

SEQ ID NO: 669 - protein, 248 aa, Klebsiella pneumoniae A5054; identical to SEQ ID NO: 263

SEQ ID NO: 670 - protein, 248 aa, Klebsiella pneumoniae i252/94
MKSVFKVSLAALTLAFAVSSHAANKTLVVATDTAFVPFEFKQGDKYVGFDVDLWAAIAKELKLDYTLKPMDFSGIIPALQTKNIDLALAGITITDERKKAIDFSDGYYKSGLLVMVNANNNDIKDVKDLNGKVVAVKSGTGSVDYAKANIKTKDLRQFPNIDNAYMELGTGRADAVLHDTPNILYFIKTAGNGKFKAVGESLEAQNYGIAFPKGSDELREKVNGALKTLRENGTYNEIYKKWFGTEPK

SEQ ID NO: 671 - protein, 248 aa, Klebsiella pneumoniae B5055; identical to SEQ ID NO: 263

SEQ ID NO: 672 - protein, 248 aa, Klebsiella pneumoniae i225/94; identical to SEQ ID NO: 263

SEQ ID NO: 673 - protein, 248 aa, Klebsiella pneumoniae D5050
MKSVFKVSLAALTLAFAVSSHAADKTLVVATDTAFVPFEFKQGDKYVGFDVDLWAAIAKELKLDYTLKPMDFSGIIPALQTKNIDLALAGITITDERKKAIDFSDGYYKSGLLVMVNANNNDIKDVKDLNGKVVAVKGGTGSVDYAKANIKTKDLRQFPNIDNAYMELGTGRADAVLHDTPNILYFIKTAGNGKFKAVGDSLEAQNYGIAFPKGSDELREKVNGALKTLRENGTYNEIYKKWFGTEPK

SEQ ID NO: 674 - protein, 248 aa, Klebsiella pneumoniae E5051; identical to SEQ ID NO: 263

SEQ ID NO: 675 - protein, 248 aa, Klebsiella pneumoniae Aerogenes4140; identical to SEQ ID NO: 263

SEQ ID NO: 676 - protein, 248 aa, Klebsiella pneumoniae 1015; identical to SEQ ID NO: 263

SEQ ID NO: 677 - protein, 248 aa, Klebsiella pneumoniae i262/94; identical to SEQ ID NO: 670

SEQ ID NO: 678 - protein, 248 aa, Klebsiella pneumoniae 919; identical to SEQ ID NO: 263

SEQ ID NO: 679 - protein, 248 aa, Klebsiella pneumoniae 313; identical to SEQ ID NO: 263

SEQ ID NO: 680 - protein, 248 aa, Klebsiella pneumoniae 1470; identical to SEQ ID NO: 263

SEQ ID NO: 681 - protein, 248 aa, Klebsiella pneumoniae 1193; identical to SEQ ID NO: 263

SEQ ID NO: 682 - protein, 248 aa, Klebsiella pneumoniae Mich61; identical to SEQ ID NO: 263

SEQ ID NO: 683 - protein, 248 aa, Klebsiella pneumoniae 2069/49; identical to SEQ ID NO: 263

SEQ ID NO: 684 - protein, 248 aa, Klebsiella pneumoniae i243/94; identical to SEQ ID NO: 670

SEQ ID NO: 685 - protein, 248 aa, Klebsiella pneumoniae 2005/49; identical to SEQ ID NO: 263

SEQ ID NO: 686 - protein, 248 aa, Klebsiella pneumoniae 1754/49; identical to SEQ ID NO: 263

SEQ ID NO: 687 - protein, 248 aa, Klebsiella pneumoniae 1702/49; identical to SEQ ID NO: 263

SEQ ID NO: 688 - protein, 248 aa, Klebsiella pneumoniae i202/94; identical to SEQ ID NO: 670

SEQ ID NO: 689 - protein, 248 aa, Klebsiella pneumoniae 1996/49; identical to SEQ ID NO: 670

SEQ ID NO: 690 - protein, 248 aa, Klebsiella pneumoniae 1680/49; identical to SEQ ID NO: 263

SEQ ID NO: 691 - protein, 248 aa, Klebsiella pneumoniae 2002/49; identical to SEQ ID NO: 263

SEQ ID NO: 692 - protein, 248 aa, Klebsiella pneumoniae 6613
MKSVFKVSLAALTLAFAVSSHAANKTLVVATDTAFVPFEFKQGDKYVGFDVDLWAAIAKELKLDYILKPMDFSGIIPALQTKNIDLALAGITITDERKKAIDFSDGYYKSGLLVMVNANNNDIKDVKDLNGKVVAVKSGTGSVDYAKANIKTKDLRQFPNIDNAYMELGTGRADAVLHDTPNILYFIKTAGNGKFKAVGESLEAQNYGIAFPKGSDELREKVNGALKTLRDNGTYNEIYKKWFGTEPK

SEQ ID NO: 693 - protein, 248 aa, Klebsiella pneumoniae 5758; identical to SEQ ID NO: 263

SEQ ID NO: 694 - protein, 248 aa, Klebsiella pneumoniae 7824; identical to SEQ ID NO: 263

SEQ ID NO: 695 - protein, 248 aa, Klebsiella pneumoniae 6258; identical to SEQ ID NO: 263

SEQ ID NO: 696 - protein, 248 aa, Klebsiella pneumoniae 6168; identical to SEQ ID NO: 263

SEQ ID NO: 697 - protein, 248 aa, Klebsiella pneumoniae i256/94; identical to SEQ ID NO: 263

SEQ ID NO: 698 - protein, 248 aa, Klebsiella pneumoniae 7749; identical to SEQ ID NO: 263

SEQ ID NO: 699 - protein, 248 aa, Klebsiella pneumoniae 2482; identical to SEQ ID NO: 263

SEQ ID NO: 700 - protein, 248 aa, Klebsiella pneumoniae 5281; identical to SEQ ID NO: 263

SEQ ID NO: 701 - protein, 248 aa, Klebsiella pneumoniae i224/94; identical to SEQ ID NO: 263

SEQ ID NO: 702 - protein, 248 aa, Klebsiella pneumoniae 1756/51; identical to SEQ ID NO: 670

SEQ ID NO: 703 - protein, 248 aa, Klebsiella pneumoniae Stanley
MKSVFKVSLAALTLAFAVSSHAATKTLVVATDTAFVPFEFKQGDKYVGFDVDLWAAIAKELKLDYTLKPMDFSGIIPALQTKNIDLALAGITITDERKKAIDFSDGYYKSGLLVMVNANNNDIKDVKDLNGKVVAVKSGTGSVDYAKANIKTKDLRQFPNIDNAYMELGTGRADAVLHDTPNILYFIKTAGNGKFKAVGESLEAQNYGIAFPKGSDELREKVNGALKTLRENGTYNEIYKKWFGTEPK

SEQ ID NO: 704 - protein, 248 aa, Klebsiella pneumoniae 3985/51; identical to SEQ ID NO: 263

SEQ ID NO: 705 - protein, 248 aa, Klebsiella pneumoniae i221/94; identical to SEQ ID NO: 263

SEQ ID NO: 706 - protein, 248 aa, Klebsiella pneumoniae 4463/52; identical to SEQ ID NO: 670

SEQ ID NO: 707 - protein, 248 aa, Klebsiella pneumoniae 5710/52; identical to SEQ ID NO: 263

SEQ ID NO: 708 - protein, 248 aa, Klebsiella pneumoniae 5711/52; identical to SEQ ID NO: 263

SEQ ID NO: 709 - protein, 248 aa, Klebsiella pneumoniae 5845/52; identical to SEQ ID NO: 263

SEQ ID NO: 710 - protein, 248 aa, Klebsiella pneumoniae NCTC8172; identical to SEQ ID NO: 263

SEQ ID NO: 711 - protein, 248 aa, Klebsiella pneumoniae 264-1; identical to SEQ ID NO: 673

SEQ ID NO: 712 - protein, 248 aa, Klebsiella pneumoniae 265-1
MKSVLKVSLAALTLAFAVSSQAAEKQLIVATDTAFVPFEFKQGDKYVGFDVDLWAAIAKELKLDYALKPMDFSGIIPALQTKNIDLALAGITITEERKKAIDFSDGYYKSGLLVMVKANNNDIKDVKDLNGKVVAVKGGTGSVDYAKANIKTKDLRQFPNIDNAYMELGTGRADAVLHDTPNILYFIKTAGHGQFKAVGDSLEAQSYGIAFPKGSDELREKVNGALKTLRENGTYNEIYKKWFGTEPK

SEQ ID NO: 713 - protein, 248 aa, Klebsiella pneumoniae 889; identical to SEQ ID NO: 712

SEQ ID NO: 714 - protein, 248 aa, Klebsiella pneumoniae 708; identical to SEQ ID NO: 263

SEQ ID NO: 715 - protein, 248 aa, Klebsiella pneumoniae 370; identical to SEQ ID NO: 263

SEQ ID NO: 716 - protein, 248 aa, Klebsiella pneumoniae Friedlaender204; identical to SEQ ID NO: 263

SEQ ID NO: 717 - protein, 248 aa, Klebsiella pneumoniae 5053; identical to SEQ ID NO: 263

SEQ ID NO: 718 - protein, 633 aa, Klebsiella pneumoniae MGH78578; identical to SEQ ID NO: 268

SEQ ID NO: 719 - protein, 633 aa, Klebsiella pneumoniae A5054
MKLQNSFRDYTAESSLFVRRALVAFLGILLLTGVLIANLYNVQIVRFDDYQTRSNENRIKLVPIPPSRGIIYDRNGTPLALNRTIYQLEMMPEKVDNVQQTLDALRDVVDLTDDDIAGFKKERARSHRFTSIPVKVNLSEVQVARFAVNQYRFPGVEVKGYKRRYYPYNSALTHVIGYVSKINDKDVDRLDKEGKLANYASTHDIGKLGIERYYEDVLHGQTGYEEVEVNNRGRVIRQLKEVPPQAGRDIYLTLDLKLQQYIETLLAGSRAAVVVTDPRTGAILALVSTPSYDPNLFVDGISSKDYSALLNDPNTPLVNRATQGVYPPASTVKPYVAVSALSAGVITRNTSLFDPGWWQLPGSEKRYRDWKKWGHGHLNVTKALEESADTYFYQVAYDMGIDRLSEWMSKFGYGHYTGIDLSEERSGNMPTREWKLKRFKKPWYQGDTIPVGIGQGYWTATPIQMNKALMLLINDGVVKVPHLLQSTVEDGKPVPWVQPHEPPVGDIHSGYWEIAKDGMYGVANRGNGTAHKYFASAPYKIAAKSGTAQVFGLKANETYNAHRISERLRDHKLMTAFAPYNNPQVAVAMILENGGAGPAVGTIMRQILDHIMLGDNNTTLPSENPAVTAGEDQ

SEQ ID NO: 720 - protein, 633 aa, Klebsiella pneumoniae i252/94
MKLQNSFRDYTAESSLFVRRALVAFLGILLLTGVLVANLYNVQIVRFNDYQTRSNENRIKLVPIPPSRGIIYDRNGTPLALNRTIYQLEMMPEKVDNVQQTLDALRDVVDLTDDDIAGFKKERARSHRFTSIPVKVNLSEVQVARFAVNQYRFPGVEVKGYKRRYYPYNSALTHVIGYVSKINDKDVDRLDKEGKLANYASTHDIGKLGIERYYEDVLHGQTGYEEVEVNNRGRVIRQLKEVPPQAGRDIYLTLDLKLQQYIETLLAGSRAAVVVTDPRTGAVLALVSTPSYDPNLFVDGISSKDYSGLLNDPNTPLVNRATQGVYPPASTVKPYVAVSALSAGVITRNTSLFDPGWWQLPGSDKRYRDWKKWGHGHLNVTKALEESADTYFYQVAYDMGIDRLSEWMSKFGYGHYTGIDLSEERSGNMPTREWKLKRFKKPWYQGDTIPVGIGQGYWTATPIQMNKALMILINDGVVKVPHLLQSTVEDGKPVPWVQPHEPPVGDIHSGYWEIAKDGMFGVANRGNGTAHKYFASAPYKIAAKSGTAQVFGLKANETYNAHRISERLRDHKLMTAFAPYNNPQVAVAMILENGGAGPAVGTIMRQILDHIMLGDNNTTLPSENPAVTAGEDQ

SEQ ID NO: 721 - protein, 633 aa, Klebsiella pneumoniae B5055; identical to SEQ ID NO: 268

SEQ ID NO: 722 - protein, 633 aa, Klebsiella pneumoniae i225/94; identical to SEQ ID NO: 268

SEQ ID NO: 723 - protein, 633 aa, Klebsiella pneumoniae D5050
MKLQNSFRDYTAESSLFVRRALVAFLGILLLTGVLIANLYNVQIVRFDDYQTRSNENRIKLVPIPPSRGIIYDRNGTPLALNRTIYQLEMMPEKVDNVQQTLDALRDVVDLTDDDIAGFKKERARSHRFTSIPVKVNLSEVQVARFAVNQYRFPGVEVKGYKRRYYPYNSALTHVIGYVSKINDKDVDRLDKEGKLANYASTHDIGKLGIERYYEDVLHGQTGYEEVEVNNRGRVIRQLKEVPPQAGRDIYLTLDLKLQQYIETLLAGSRAAVVVTDPRTGAILALVSTPSYDPNLFVDGISSKDYSALLNDPNTPLVNRATQGVYPPASTVKPYVAVSALSAGVITRNTSLFDPGWWQLPGSEKRYRDWKKWGHGHLNVTKALEESADTYFYQVAYDMGIDRLSEWMSKFGYGHYTGIDLSEERSGNMPTREWKLKRFKKPWYQGDTIPVGIGQGYWTATPIQMNKALMILINDGVVKVPHLLQSTVEDGKPVPWVQPHEPPVGDIHSGYWEIAKDGMFGVANRGNGTAHKYFASAPYKIAAKSGTAQVFGLKANETYNAHRIAERLRDHKLMTAFAPYNNPQVAVAIILENGGAGPAVGTIMRQILDHIMLGDNNTNLPSENPAVTAGEDQ

SEQ ID NO: 724 - protein, 633 aa, Klebsiella pneumoniae E5051
MKLQNSFRDYTAESSLFVRRALVAFLGILLLTGVLIANLYNVQIVRFDDYQTRSNENRIKPVPIPPSRGIIYDRNGTPLALNRTIYQLEMMPEKVDNVQQTLDALRDVVDLTDDDIAGFKKERARSHRFTSIPVKVNLSEVQVARFAVNQYRFPGVEVKGYKRRYYPYNSALTHVIGYVSKINDKDVDRLDKEGKLANYASTHDIGKLGIERYYEDVLHGQTGYEEVEVNNRGRVIRQLKEVPPQAGRDIYLTLDLKLQQYIETLLAGSRAAVVVTDPRTGAILALVSTPSYDPNLFVDGISSKDYSALLNDPNTPLVNRATQGVYPPASTVKPYVAVSALSAGVITRNTSLFDPGWWQLPGSEKRYRDWKKWGHDHLNVTKALEESADTYFYQVAYDMGIDRLSEWMSKFGYGHYTGIDLSEERSGNMPTREWKLKRFKKPWYQGDTIPVGIGQGYWTATPIQMNKALMILINDGVVKVPHLLQSTVEDGKPVPWVQPHEPPVGDIHSGYWEIAKDGMYGVANRGNGTAHKYFASAPYKIAAKSGTAQVFGLKANETYNAHRISERLRDHKLMTAFAPYNNPQVAVAMILENGGAGPAVGTIMRQILDHIMLGDNNTTLPSENPAVTAGEDQ

SEQ ID NO: 725 - protein, 633 aa, Klebsiella pneumoniae Aerogenes4140
MKLQNSFRDYTAESSLFVRRALVAFLGILLLTGVLIANLYNVQIVRFDDYQTRSNENRIKLVPIPPSRGIIYDRNGTPLALNRTIYQLEMMPEKVDNVQQTLDALRDVVDLTDDDIAGFKKERARSHRFTSIPVKVNLSEVQVARFAVNQYRFPGVEVKGYKRRYYPYNSALTHVIGYVSKINDKDVDRLDKEGKLANYASTHDIGKLGIERYYEDVLHGQTGYEEVEVNNRGRVIRQLKEVPPQAGRDIYLTLDLKLQQYIETLLAGSRAAVVVTDPRTGAILALVSTPSYDPNLFVDGISSKDYSALLNDPNTPLVNRATQGVYPPASTVKPYVAVSALSAGVITRNTSLFDPGWWQLPGSEKRYRDWKKWGHGHLNVTKALEESADTYFYQVAYDMGIDRLSEWMSKFGYGHYTGIDLSEERSGNMPTREWKLKRFKKPWYQGDTIPVGIGQGYWTATPIQMNKALMILINDGVVKVPHLLQSTVEDGKPVPWVQPHEPPVGDIHSGYWEIAQDGMYGVANRGNGTAHKYFASAPYKIAAKSGTAQVFGLKANETYNAHRISERLRDHKLMTAFAPYNNPQVAVAMILENGGAGPAVGTIMRQILDHIMLGDNNTTLPSENPAVTAGEDQ

SEQ ID NO: 726 - protein, 633 aa, Klebsiella pneumoniae 1015; identical to SEQ ID NO: 268

SEQ ID NO: 727 - protein, 633 aa, Klebsiella pneumoniae i262/94; identical to SEQ ID NO: 720

SEQ ID NO: 728 - protein, 633 aa, Klebsiella pneumoniae 919; identical to SEQ ID NO: 268

SEQ ID NO: 729 - protein, 633 aa, Klebsiella pneumoniae 313; identical to SEQ ID NO: 268

SEQ ID NO: 730 - protein, 633 aa, Klebsiella pneumoniae 1470; identical to SEQ ID NO: 268

SEQ ID NO: 731 - protein, 633 aa, Klebsiella pneumoniae 1193; identical to SEQ ID NO: 268

SEQ ID NO: 732 - protein, 633 aa, Klebsiella pneumoniae Mich61; identical to SEQ ID NO: 268

SEQ ID NO: 733 - protein, 633 aa, Klebsiella pneumoniae 2069/49; identical to SEQ ID NO: 268

SEQ ID NO: 734 - protein, 633 aa, Klebsiella pneumoniae i243/94; identical to SEQ ID NO: 720

SEQ ID NO: 735 - protein, 633 aa, Klebsiella pneumoniae 2005/49; identical to SEQ ID NO: 268

SEQ ID NO: 736 - protein, 633 aa, Klebsiella pneumoniae 1754/49; identical to SEQ ID NO: 268

SEQ ID NO: 737 - protein, 633 aa, Klebsiella pneumoniae 1702/49; identical to SEQ ID NO: 268

SEQ ID NO: 738 - protein, 633 aa, Klebsiella pneumoniae i202/94
MKLQNSFRDYTAESSLFVRRALVAFLGILLLTGVLIANLYNVQIVRFDDYQTRSNENRIKLVPIPPSRGIIYDRNGTPLALNRTIYQLEMMPEKVDNVQHTLDALRDVVDLTDDEIAGFKKERAPSHAFTSIPVKVNLSEVQVVRFAVNQYRFPGVEVKGYKRRYYPYNSALTHVIGYVSKINDKHVDRLDKEGKLANYASTHDIGKLGIERYYDDVLHGQTGYEEVEVNNRGRVIRQLKEVPPQAGRDIYLTLDLKLQQYIETLLAGSRAAVVVTDPRTGAILALVSTPSYDPNLFVDGISSKDYSGLLNDPNTPLVNRATQGVYPPASTVKPYVAVSALSAGVITRNTSLFDPGWWQLPGSEKRYRDWKKWGHGHLNVTKALEESADTYFYQVAYDMGIDRLAEWMSKFGYGHYTGIDLAEERSGNMPTREWKLKRFKKPWYQGDTIPVGIGQGYWTATPIQMNKALMILINDGVVKVPHLLQSTVEDGKPVPWVQPHEPPVGDIHSGYWEIAKDGMFGVANRGNGTAHKYFASAPYKIAAKSGTAQVFGLKANETYNAHRISERLRDHKLMTAFAPYNNPQVAVAMILENGGAGPAVGTIMRQILDHIMLGDNNTTLPSENPAVTAGEDQ

SEQ ID NO: 739 - protein, 633 aa, Klebsiella pneumoniae 1996/49; identical to SEQ ID NO: 268

SEQ ID NO: 740 - protein, 633 aa, Klebsiella pneumoniae 1680/49; identical to SEQ ID NO: 268

SEQ ID NO: 741 - protein, 633 aa, Klebsiella pneumoniae 2002/49; identical to SEQ ID NO: 268

SEQ ID NO: 742 - protein, 633 aa, Klebsiella pneumoniae 6613; identical to SEQ ID NO: 268

SEQ ID NO: 743 - protein, 633 aa, Klebsiella pneumoniae 5758; identical to SEQ ID NO: 268

SEQ ID NO: 744 - protein, 633 aa, Klebsiella pneumoniae 5725y
MKLQNSFRDYTAESSLFVRRALVAFLGILLLTGVLIANLYNVQIVRFDDYQTRSNENRIKLVPIPPSRGIIYDRNGTPLALNRTIYQLEMMPEKVDNVQQTLDALRDVVDLTDDDIAGFKKERARSHRFTSIPVKVNLSEVQVARFAVNQYRFPGVEVKGYKRRYYPYNSALTHVIGYVSKINDKDVDRLDKEGKLANYASTHDIGKLGIERYYEDVLHGQTGYEEVEVNNRGRVIRQLKEVPPQAGRDIYLTLDLKLQQYIETLLAGSRAAVVVTDPRTGAILALVSTPSYDPNLFVDGISSKDYSALLNDPNTPLVNRATQGVYPPASTVKPYVAVSALSAGVITRNTSLFDPGWWQLPGSEKRYRDWKKWGHGHLNVTKALEESADTYFYQVAYDMGIDRLSEWMSKFGYGHYTGIDLSEERSGNMPTREWKLKRFKKPWYQGDTIPVGIGQGYWTATPIQMNKALMILINDGVVKVSHLLQSTVEDGKPVPWVQPHEPPVGDIHSGFWEIAKDGMFGVANRGNGTAHKYFASAPYKIAAKSGTAQVFGLKANETYNAHRIAERLRDHKLMTAFAPYNNPQVAVAIILENGGAGPAVGTIMRQILDHIMLGDNNTNLPSENPAVTAGEDQ

SEQ ID NO: 745 - protein, 633 aa, Klebsiella pneumoniae 7824; identical to SEQ ID NO: 268

SEQ ID NO: 746 - protein, 633 aa, Klebsiella pneumoniae 6258; identical to SEQ ID NO: 268

SEQ ID NO: 747 - protein, 633 aa, Klebsiella pneumoniae 6168; identical to SEQ ID NO: 268

SEQ ID NO: 748 - protein, 633 aa, Klebsiella pneumoniae i256/94; identical to SEQ ID NO: 268

SEQ ID NO: 749 - protein, 633 aa, Klebsiella pneumoniae 7749; identical to SEQ ID NO: 268

SEQ ID NO: 750 - protein, 633 aa, Klebsiella pneumoniae 2482; identical to SEQ ID NO: 268

SEQ ID NO: 751 - protein, 633 aa, Klebsiella pneumoniae 5281; identical to SEQ ID NO: 268

SEQ ID NO: 752 - protein, 633 aa, Klebsiella pneumoniae i224/94; identical to SEQ ID NO: 268

SEQ ID NO: 753 - protein, 633 aa, Klebsiella pneumoniae 1756/51; identical to SEQ ID NO: 720

SEQ ID NO: 754 - protein, 633 aa, Klebsiella pneumoniae Stanley
MKLQNSFRDYTAESSLFVRRALVAFLGILLLTGVLVANLYNVQIVRFNDYQTRSNENRIKLVPIPPSRGIIYDRNGTPLALNRTIYQLEMMPEKVDNVQQTLDALRDVVDLTDDDIAGFKKERARSHRFTSIPVKVNLSEVQVARFAVNQYRFPGVEVKGYKRRYYPYNSALTHVIGYVSKINDKDVDRLDKEGKLANYASTHDIGKLGIERYYEDVLHGQTGYEEVEVNNRGRVIRQLKEVPPQAGRDIYLTLDLKLQQYIETLLAGSRAAVVVTDPRTGAVLALVSTPSYDPNLFVDGISRKDYSGLLNDPNTPLVNRATQGVYPPASTVKPYVAVSALSAGVITRNTSLFDPGWWQLPGSDKRYRDWKKWGHGHLNVTKALEESADTYFYQVAYDMGIDRLSEWMSKFGYGHYTGIDLSEERSGNMPTREWKLKRFKKPWYQGDTIPVGIGQGYWTATPIQMNKALMILINDGVVKVPHLLQSTVEDGKPVPWVQPHEPPVGDIHSGYWEIAKDGMFGVANRGNGTAHKYFASAPYKIAAKSGTAQVFGLKANETYNAHRISERLRDHKLMTAFAPYNNPQVAVAMILENGGAGPAVGTIMRQILDHIMLGDNNTTLPSENPAVTAGEDQ

SEQ ID NO: 755 - protein, 633 aa, Klebsiella pneumoniae 3985/51; identical to SEQ ID NO: 268

SEQ ID NO: 756 - protein, 633 aa, Klebsiella pneumoniae i221/94; identical to SEQ ID NO: 268

SEQ ID NO: 757 - protein, 633 aa, Klebsiella pneumoniae 4463/52
MKLQNSFRDYTAESSLFVRRALVAFLGILLLTGVLIANLYNVQIVRFDDYQTRSNENRIKLVPIPPSRGIIYDRNGTPLALNRTIYQLEMMPEKVDNVQQTLDALRDVVDLTDDDIAGFKKERARSHRFTSIPVKVNLSEVQVARFAVNQYRFPGVEVKGYKRRYYPYNSALTHVIGYVSKINDKDVDRLDKEGKLANYASTHDIGKLGIERYYEDVLHGQTGYEEVEVNNRGRVIRQLKEVPPQAGRDIYLTLDLKLQQYIETLLAGSRAAVVVTDPRTGAILALVSTPSYDPNLFVDGISSKDYSGLLNDPNTPLVNRATQGVYPPASTVKPYVAVSALSAGVITRNTSLFDPGWWQLPGSEKRYRDWKKWGHGHLNVTKALEESADTYFYQVAYDMGIDRLAEWMSKFGYGHYTGIDLAEERSGNMPTREWKLKRFKKPWYQGDTIPVGIGQGYWTATPIQMNKALMILINDGVVKVPHLLQSTVEDGKPVPWVQPHEPPVGDIHSGYWEIAKDGMFGVANRGNGTAHKYFASAPYKIAAKSGTAQVFGLKANETYNAHRISERLRDHKLMTAFAPYNNPQVAVAMILENGGAGPAVGTIMRQILDHIMLGDNNTTLPSENPAVTAGEDQ

SEQ ID NO: 758 - protein, 633 aa, Klebsiella pneumoniae 5710/52; identical to SEQ ID NO: 268

SEQ ID NO: 759 - protein, 633 aa, Klebsiella pneumoniae 5711/52; identical to SEQ ID NO: 268

SEQ ID NO: 760 - protein, 633 aa, Klebsiella pneumoniae 5845/52; identical to SEQ ID NO: 268

SEQ ID NO: 761 - protein, 633 aa, Klebsiella pneumoniae NCTC8172
MKLQNSFRDYTAESSLFVRRALVAFLGILLLTGVLIANLYNVQIVRFDDYQTRSNENRIKLVPIPPSRGIIYDRNGTPLALNRTIYQLEMMPEKVDNVQQTLDALRDVVDLTDDDIAGFKKERARSHRFTSIPVKVNLSEVQVARFAVNQYRFPGVEVKGYKRRYYPYNSALTHVIGYVSKINDKDVDRLDKEGKLANYASTHDIGKLGIERYYEDVLHGQTGYEEVEVNNRGRVIRQLKEVPPQAGRDIYLTLDLKLQQYIETLLAGSRAAVVVTDPRTGAILALVSTPSYDPNLFVDGISSKDYSALLNDPNTPLVNRATQGVYPPASTVKPYVAVSALSAGVITRNTSLFDPGWWQLPGSEKRYRDWKKWGHGHLNVTKALEESADTYFYQVAYDMGIDRLSEWMSKFGYGHYTGIDLSEERSGNMPTREWKLKRFKKPWYQGDTIPVGIGQGYWTATPIQMNKALMILINDGVVKVPHLLQSTVEDGKPVPWIQPHEPPVGDIHSGYWEIAKDGMYGVANRGNGTAHKYFASAPYKIAAKSGTAQVFGLKANETYNAHRISERLRDHKLMTAFAPYNNPQVAVAMILENGGAGPAVGTIMRQILDHIMLGDNNTTLPSENPAVTAGEDQ

SEQ ID NO: 762 - protein, 633 aa, Klebsiella pneumoniae 708; identical to SEQ ID NO: 268

SEQ ID NO: 763 - protein, 633 aa, Klebsiella pneumoniae 370; identical to SEQ ID NO: 268

SEQ ID NO: 764 - protein, 633 aa, Klebsiella pneumoniae Friedlaender204
MKLQNSFRDYTAESSLFVRRALVAFLGILLLTGVLIANLYNVQIVRFDDYQTRSNENRIKLVPIPPSRGIIYDRNGTPLALNRTIYQLEMMPEKVDNVQQTLDALRDVVDLTDDDIAGFKKERARSHRFTSIPVKVNLSEVQVARFAVNQYRFPGVEVKGYKRRYYPYNSALTHVIGYVSKINDKDVDRLDKEGKLANYASTHDIGKLGIERYYEDVLHGQTGYEEVEVNNRGRVIRQLKEVPPQAGRDIYLTLDLKLQQYIETLLAGSRAAVVVTDPRTGAILALVSTPSYDPNLFVDGISSKDYSALLNDPNTPLVNRATQGVYPPASTVKPYVAVSALSAGVITRNTSLFDPGWWQLPGSEKRYRDWKKWGHGHLNVTKALEESAGTYFYQVAYDMGIDRLSEWMSKFGYGHYTGIDLSEERSGNMPTREWKLKRFKKPWYQGDTIPVGIGQGYWTATPIQMNKALMILINDGVVKVPHLLQSTVEDGKPVPWVQPHEPPVGDIHSGYWEIAKDGMYGVANRGNGTAHKYFASAPYKIAAKSGTAQVFGLKANETYNAHRISERLRDHKLMTAFAPYNNPQVAVAMILENGGAGPAVGTIMRQILDHIMLGDNNTTLPSENPAVTAGEDQ

SEQ ID NO: 765 - protein, 633 aa, Klebsiella pneumoniae 5053; identical to SEQ ID NO: 268

1. An isolated nucleic acid molecule encoding an antigen or a fragment thereof, comprising a nucleic acid sequence, which is selected from the group consisting of:
a) a nucleic acid molecule having at least 70% sequence identity to a nucleic acid molecule having a nucleotide sequence selected from the group comprising Seq ID Nos: 1 to 187 and Seq ID No 375,
b) a nucleic acid molecule which is complementary to the nucleic acid molecule of a),
c) a nucleic acid molecule comprising at least 15 sequential bases of the nucleic acid molecule of a) or b),
d) a nucleic acid molecule which anneals under stringent hybridisation conditions to the nucleic acid molecule of a), b), or c),
e) a nucleic acid molecule which, but for the degeneracy of the genetic code, would hybridize to the nucleic acid molecule defined in a), b), c), or d).

2. The isolated nucleic acid molecule according to claim 1, wherein the sequence identity to Seq ID Nos: 1 to 187 or Seq ID No 375 is at least 80%.

3. The nucleic acid molecule according to claim 1, wherein the nucleic acid is DNA or RNA.

4. (canceled)

5. An isolated nucleic acid molecule according to claim 1, wherein the nucleic acid molecule is isolated from a genomic DNA from a Klebsiella species.

6. The nucleic acid according to claim 1, wherein the fragment is an active fragment or an active variant thereof.

7. The nucleic acid according to claim 1, wherein the antigen or fragment thereof, comprises or consists of a polypeptide or peptide fragment from Klebsiella.

8. A vector comprising a nucleic acid molecule according to claim 1.

9. (canceled)

10. A host cell comprising the vector as defined in claim 8.

11. An antigen that is immunologically reactive with sera from a human having a Klebsiella infection, or from an uninfected healthy human who was previously infected with Klebsiella.

12. An antigen comprising or consisting of an isolated polypeptide selected from the group consisting of Seq ID Nos: 188 to 374, Seq ID No 376 or an active fragment or an active variant thereof.

13. The antigen according to claim 12, wherein the polypeptide is encoded by a nucleic acid molecule as defined in claim 1.

14. The antigen according to claim 12, wherein the active fragment thereof consists of at least 50%, of said polypeptide.

15. The antigen according to claim 12, wherein the active variant thereof has at least 50% sequence identity to said polypeptide.

16. The antigen according to claim 14, wherein the active fragment thereof comprises or consists of an amino acid sequence selected from the group consisting of amino acids 2-130 of Seq ID No 205; amino acids 26-356 of Seq ID No 216; amino acids 2-180 of Seq ID No 223; amino acids 1-168 of Seq ID No 224; amino acids 23-397 of Seq ID No 235; amino acids 2-420 and 414-847 of Seq ID No 240; amino acids 582-1099 of Seq ID No 241; amino acids 1-245 of Seq ID No 242; amino acids 24-703 of Seq ID No 247; amino acids 23-328 of Seq ID No 252; amino acids 23-248 of Seq ID No 263; amino acids 2-335 of Seq ID No 267; amino acids 38-633 of Seq ID No 268; amino acids 26-742 of Seq ID No 269; amino acids 26-429 of Seq ID No 281; and amino acids 1-632 of Seq ID No 285.

17. The antigen according to claim 15, wherein the active variant thereof has at least 50% sequence identity to an amino acid sequence selected from the group consisting of amino acids 2-130 of Seq ID No 205; amino acids 26-356 of Seq ID No 216; amino acids 2-180 of Seq ID No 223; amino acids 1-168 of Seq ID No 224; amino acids 23-397 of Seq ID No 235; amino acids 2-420 and 414-847 of Seq ID No 240; amino acids 582-1099 of Seq ID No 241; amino acids 1-245 of Seq ID No 242; amino acids 24-703 of Seq ID No 247; amino acids 23-328 of Seq ID No 252; amino acids 23-248 of Seq ID No 263; amino acids 2-335 of Seq ID No 267; amino acids 38-633 of Seq ID No 268; amino acids 26-742 of Seq ID No 269; amino acids 26-429 of Seq ID No 281; and amino acids 1-632 of Seq ID No 285.

18. The antigen according to claim 12, wherein the active variant thereof is derived from the homologous sequence of a different serotype of K. pneumoniae.

19. The antigen according to claim 12, wherein the active variant is selected from the group consisting of SEQ ID No 413 to 765.

20. The antigen according to claim 16 or 17, whereby the antigen is further defined by
a) 1 to 400 additional amino acid residue(s) to the active fragment of the antigen comprising or consisting of amino acids 2-420 or 414-847 of Seq ID No 240 or to the active variant of the antigen derived from amino acids 2-420 or 414-847 of Seq ID No 240; or
b) 1 to 1100 additional amino acid residue(s) to the active fragment of the antigen comprising or consisting of amino acids 582-1099 of Seq ID No 241 or to the active variant of the antigen derived from amino acids 582-1099 of Seq ID No 241.

21-22. (canceled)

23. The antigen according to claim 20, whereby said additional amino acid residue(s) is/are flanking the antigen defined by
a) amino acids 2-420 of Seq ID No 240 or the variant derived thereof C-terminally,
b) amino acids 414-847 of Seq ID No 240 or the variant derived thereof N-terminally, or
c) amino acids 582-1099 of Seq ID No 241 or the variant derived thereof N- and/or C-terminally.

24. (canceled)

25. An antigen comprising at least one core amino acid sequence as indicated in column “Predicted immunogenic aa” or “Location of identified immunogenic region” of Table 1, or as defined by columns “From aa” and “To aa” of Table 4, or as indicated in column “Location in protein (aa)” of Table 5, whereby more preferably the core amino acid sequence is selected from the group consisting of:
amino acids 11-27, 35-47, 68-107, 113-122, 124-136, 140-146, 152-164, 168-174, 183-201, 211-218, 228-243, 246-253 and 180-226 of Seq ID No 204; amino acids 13-31, 48-59, 69-91, 109-115, 121-127 and 46-105 of Seq ID No 205; amino acids 12-44, 49-95, 102-145, 148-178, 184-229, 233-244, 249-273, 292-299, 304-329, 334-348, 354-365, 367-385, 394-426, 428-440, 444-487, 503-527, 531-539, 546-554, 556-584 and 273-286 of Seq ID No 206; amino acids 7-17, 22-32, 34-41, 55-77, 79-86, 93-111, 118-126, 131-148, 152-162, 165-177, 183-197, 213-220, 234-250, 253-262, 267-294 and 211-269 of Seq ID No 207; amino acids 22-29, 41-56, 58-66, 79-88, 94-121, 124-131, 134-157, 162-171, 173-180, 189-197, 201-214, 216-224, 242-254, 257-270, 282-287, 290-302, 309-315, 320-325, 341-355, 362-368, 372-378 and 1-48 of Seq ID No 208; amino acids 5-15, 18-35, 48-61, 65-71, 112-119, 138-154, 157-169, 179-208, 214-223, 226-232, 243-250, 256-262, 277-286, 289-296, 338-348, 352-363, 370-376, 385-408, 420-436, 443-454, 462-483, 498-561, 563-592, 600-642, 661-671, 673-709, 714-733, 748-754, 771-776, 798-806, 808-821, 823-839 and 31-83 of Seq ID No 209; amino acids 5-14, 21-26, 31-41, 59-77, 101-115, 132-145, 147-156, 180-185, 188-197 and 97-158 of Seq ID No 210; amino acids 6-18, 23-43, 45-56, 69-80, 87-97, 112-123, 135-151, 164-171, 178-193, 200-227, 249-258, 262-274, 279-291, 302-308, 322-327, 329-336, 351-363, 366-373, 384-399, 403-411, 415-434, 440-446, 461-482, 488-506, 510-516, 518-551, 574-589, 607-629, 634-665, 667-687, 694-712, 725-739, 743-751, 753-768 and 521-583 of Seq ID No 211; amino acids 4-13, 19-44, 55-63, 71-82, 89-110, 120-130, 132-138, 145-161, 168-182, 189-258, 261-272, 278-288, 290-301 and 11-76 of Seq ID No 212; amino acids 4-22, 43-56, 63-68, 81-90, 93-99, 139-148, 155-160, 170-176, 189-195, 207-218, 227-232, 241-249, 251-258, 260-266, 277-295, 300-327, 329-336, 340-356, 384-390, 418-423, 427-433, 438-444 and 383-428 of Seq ID No 213; amino acids 10-18, 32-37, 45-55, 60-69, 77-83, 89-95, 120-125, 133-170, 172-185, 193-211, 214-223, 232-249, 255-275, 277-303, 305-310, 320-328, 334-341, 347-353, 355-369, 380-386, 389-395 and 71-85 of Seq ID No 214; amino acids 4-23, 27-35, 67-73, 80-103, 117-126, 132-138, 140-159, 162-171, 180-194, 198-208, 211-218, 228-234, 239-253, 262-270, 272-291, 296-305 and 39-110 of Seq ID No 215; amino acids 13-24, 27-34, 37-66, 69-88, 99-104, 149-155, 164-175, 184-193, 199-209, 227-235, 264-273, 276-285, 288-315, 323-335, 346-353, 56-111 and 199-261 of Seq ID No 216; amino acids 11-22, 25-48, 51-60, 64-72, 80-96, 108-122, 132-137, 142-150, 152-167, 175-199, 214-229, 237-244, 252-258, 260-266, 279-287, 301-340, 345-350 and 109-153 of Seq ID No 217; amino acids 37-43, 50-57, 65-82, 87-109, 123-129, 141-150, 152-157, 166-172, 179-203, 209-241, 249-284, 290-300, 308-326, 329-335, 345-357, 359-368, 379-386, 390-417, 420-425, 438-444, 461-466, 473-490, 497-505, 524-534, 541-550, 586-597, 608-614, 622-632, 660-666, 679-694, 696-706, 708-722, 725-731, 737-763, 784-789, 810-825, 837-854, 857-880, 882-895, 901-907, 911-928, 14-76 and 176-220 of Seq ID No 218; amino acids 9-16, 38-52, 61-86, 93-100, 110-117, 123-132, 138-145, 151-169, 172-181, 186-202, 208-225, 227-253, 264-275, 289-295, 320-329, 335-342 and 113-193 of Seq ID No 219; amino acids 11-18, 24-30, 42-49, 53-63, 69-80, 87-93, 95-103, 144-171, 173-185, 193-200, 202-208, 215-221, 242-261, 266-273, 277-286, 290-299, 322-328, 338-351, 354-377, 391-409, 441-451, 461-466, 499-515, 521-527, 562-569, 621-629, 647-663, 676-682, 694-701, 703-713, 725-731, 735-744, 755-764, 793-800 and 490-547 of Seq ID No 220; amino acids 4-11, 14-22, 38-70, 81-90, 97-114, 118-132, 147-171, 173-181, 187-202, 244-250, 252-298, 301-311, 313-331, 342-368, 410-418, 446-451, 456-462, 468-474, 476-492, 499-507, 519-528, 552-565, 568-575, 584-613, 618-624, 626-649 and 417-489 of Seq ID No 221; amino acids 4-9, 32-53, 66-72, 74-90, 97-104, 110-130, 133-139, 144-152, 166-177, 203-213, 215-241, 256-275, 291-304, 307-316, 321-326, 334-345, 352-367 and 201-255 of Seq ID No 222; amino acids 13-19, 26-43, 66-72, 80-85, 95-101, 109-125, 131-137 and 25-107 of Seq ID No 223; amino acids 13-24, 35-43, 50-56, 58-68, 77-83, 104-110, 117-125, 132-138, 140-153 and 19-66 of Seq ID No 224; amino acids 15-31, 37-42, 47-54, 68-87, 89-96, 107-117, 121-127, 131-137, 145-151, 176-182, 220-226, 232-246, 250-257, 291-300, 317-325, 328-333, 337-359, 368-393, 403-428, 460-478, 480-493, 500-506, 511-516, 519-526, 528-559, 565-572, 584-595, 597-605, 608-613, 626-648, 679-684, 687-693, 703-714, 718-735, 742-750, 757-765, 768-788, 793-799, 813-819, 823-829, 839-850 and 576-623 of Seq ID No 225; amino acids 10-35, 37-60, 63-76, 79-86, 88-97, 108-113, 118-126, 128-134, 138-145, 153-159, 168-188, 194-208, 211-243, 255-260, 270-276, 285-301, 307-346, 348-367 and 275-339 of Seq ID No 226; amino acids 4-17, 21-33, 35-42, 47-64, 72-80, 85-92, 98-103, 125-147, 151-161, 165-177, 183-230, 232-246, 256-262, 284-306, 310-328, 331-367, 369-383, 392-399 and 32-85 of Seq ID No 227; amino acids 5-11, 18-27, 42-52, 60-65, 75-84, 90-102, 107-116, 125-178, 184-206, 221-233, 235-242, 249-257, 264-277, 288-317 and 267-313 of Seq ID No 228; amino acids 5-11, 14-42, 50-75, 79-86, 89-98, 120-125, 152-160, 166-181, 185-193, 200-207 and 85-114 of Seq ID No 229; amino acids 4-30, 36-43, 46-55, 63-111, 144-152, 159-168, 179-189, 191-200, 205-213 and 37-109 of Seq ID No 230; amino acids 20-45, 57-77, 80-100, 119-126, 131-137, 143-169, 179-185, 195-203, 207-231, 235-264, 282-302, 320-329, 341-347, 353-359, 361-373 and 266-296 of Seq ID No 231; amino acids 5-22, 24-37, 41-55, 57-65, 72-78, 90-103, 105-116, 119-130, 164-170, 190-202, 209-231, 244-254, 260-276, 300-339, 344-350, 355-376, 389-397, 399-406, 408-421, 429-437 and 103-152 of Seq ID No 232; amino acids 8-16, 18-25, 31-47, 71-82, 87-102, 104-114, 126-156, 176-183, 190-200, 205-212, 218-228, 231-243, 256-279, 287-301, 303-312, 324-332, 335-348, 351-357, 365-380, 395-412, 422-451, 456-464, 467-483, 501-507 and 405-468 of Seq ID No 233; amino acids 4-18, 21-39, 46-56, 63-69, 72-86, 116-130, 132-160, 162-190, 196-201, 209-231, 233-241, 251-265, 269-282, 292-298, 309-324, 333-369, 391-415, 417-427, 436-454, 471-480, 482-499, 510-518, 521-533, 537-543, 545-561, 571-581, 585-597, 599-607, 609-635, 638-643, 650-665, 671-685, 687-695, 701-707, 710-720, 724-736, 747-757, 764-769, 772-784, 791-796, 808-820 and 317-401 of Seq ID No 234; amino acids 4-12, 15-33, 58-77, 82-89, 98-106, 108-118, 120-135, 141-147, 152-160, 168-215, 225-233, 235-247, 250-264, 284-312, 314-321, 336-343, 359-374, 386-394 and 159-218 of Seq ID No 235; amino acids 4-16, 24-36, 40-47, 49-56, 61-81, 84-143, 148-156, 158-164, 170-175, 194-206, 208-214 and 126-203 of Seq ID No 236; amino acids 28-45, 50-61, 94-111, 113-124, 137-142, 147-173, 180-188, 190-196, 202-223, 229-235, 239-249, 262-270, 280-288, 290-321, 325-332, 347-355, 359-368, 389-407, 415-427, 429-453, 458-465, 477-485, 499-505, 516-527, 531-549, 569-592, 594-602, 605-615, 628-635, 647-659, 662-683, 727-735, 760-765, 771-780, 788-809, 811-818 and 549-630 of Seq ID No 237; amino acids 21-28, 33-40, 48-100, 104-111, 113-134 and 1-46 of Seq ID No 238; amino acids 12-24, 31-41, 53-61, 73-87, 112-128, 133-140, 151-156 and 26-98 of Seq ID No 239; amino acids 4-9, 19-26, 32-56, 58-67, 71-81, 90-95, 97-105, 112-118, 124-132, 138-144, 147-167, 169-177, 199-207, 212-217, 231-241, 250-260, 266-272, 274-282, 289-296, 299-310, 316-331, 344-350, 352-363, 368-377, 381-394, 399-406, 412-450, 459-473, 486-503, 508-514, 518-548, 564-570, 579-587, 602-608, 616-623, 628-635, 638-654, 678-688, 691-696, 703-709, 716-723, 761-772, 784-793, 819-826, 835-844 and 790-834 of Seq ID No 240; amino acids 4-10, 18-36, 43-50, 63-71, 75-105, 109-117, 134-140, 145-157, 176-182, 184-201, 203-211, 215-225, 240-250, 262-284, 294-309, 313-319, 327-337, 350-356, 361-367, 372-393, 411-421, 428-451, 453-466, 487-492, 501-528, 535-553, 564-574, 592-605, 612-629, 631-640, 646-653, 658-666, 673-681, 713-718, 720-730, 739-749, 784-792, 821-826, 833-844, 853-863, 871-876, 885-894, 900-918, 937-950, 952-957, 972-990, 995-1001, 1024-1036, 1039-1044, 1049-1055, 1062-1089, 1091-1103, 1110-1121, 1123-1129, 1131-1151, 1157-1179, 1181-1201, 1204-1223, 1233-1244, 1269-1276, 1279-1286, 1294-1301, 1303-1309, 1315-1338, 1350-1362, 1373-1381, 1398-1406, 1412-1423, 1440-1446, 1458-1466, 1481-1487, 1492-1508, 1511-1518, 1528-1534, 1536-1547, 1553-1565, 1606-1617, 1619-1644 and 761-781 of Seq ID No 241; amino acids 6-13, 31-38, 47-60, 71-102, 107-123, 128-155, 173-179, 185-194, 210-220 and 161-232 of Seq ID No 242; amino acids 11-34, 36-43, 49-67, 74-79, 84-92, 94-100, 103-112, 120-129, 134-155, 162-173, 177-185, 189-202, 206-211 and 130-185 of Seq ID No 243; amino acids 4-10, 20-35, 37-46, 48-55, 60-66, 75-82, 87-98, 133-150, 166-172, 178-189, 208-214, 230-235, 245-251, 271-308, 319-333, 335-355, 373-380 and 117-201 of Seq ID No 244; amino acids 4-30, 54-65, 91-105, 107-131, 135-154, 163-192, 199-208, 210-224, 229-239, 248-257, 263-279, 281-294, 328-354, 373-379, 382-405, 426-453, 462-487 and 249-323 of Seq ID No 245; amino acids 4-10, 12-24, 45-55, 75-88 and 24-40 of Seq ID No 246; amino acids 4-14, 20-37, 47-53, 55-61, 75-81, 97-103, 107-124, 129-135, 139-147, 160-166, 169-175, 181-190, 202-221, 247-255, 272-285, 300-310, 318-332, 351-361, 384-397, 406-427, 442-449, 458-482, 494-503, 512-524, 531-539, 552-562, 577-588, 590-596, 600-608, 613-624, 637-668, 692-700 and 232-278 of Seq ID No 247; amino acids 33-39, 49-55, 68-84, 90-96, 104-120, 126-143, 150-159, 168-191, 197-208, 219-225, 227-233, 241-247, 63-115 and 200-250 of Seq ID No 248; amino acids 4-22, 24-34, 36-55, 57-76, 83-97, 99-117, 135-143, 145-157, 163-174, 178-198, 200-207, 209-270, 276-290, 321-335, 338-347, 367-374, 393-402, 404-411, 416-422, 443-460, 467-473 and 117-183 of Seq ID No 249; amino acids 26-37, 44-52, 57-96, 104-111, 118-124, 155-177, 179-197, 201-214, 223-233, 243-250, 257-262, 291-297, 303-314, 319-363 and 47-105 of Seq ID No 250; amino acids 36-43, 45-60, 76-97, 107-125, 131-156, 158-164 and 118-163 of Seq ID No 251; amino acids 5-32, 40-50, 52-60, 70-88, 92-101, 106-126, 138-150, 152-161, 175-193, 201-234, 237-248, 270-285, 297-303, 312-318 and 209-255 of Seq ID No 252; amino acids 4-12, 23-34, 49-55, 59-65, 70-81, 83-130 and 62-113 of Seq ID No 253; amino acids 4-26, 38-49, 69-76, 82-96, 103-119, 126-140, 143-190, 194-209, 212-218 and 100-167 of Seq ID No 254; amino acids 7-29, 35-47, 56-66, 80-94, 97-123, 125-148, 150-160, 166-173, 175-191, 193-200, 207-225 and 75-176 of Seq ID No 255; amino acids 14-36, 39-45, 51-59, 66-71, 76-88, 106-117, 121-126, 140-157, 164-187, 198-206, 210-252 and 202-256 of Seq ID No 256; amino acids 4-19, 27-35, 90-107, 120-134, 144-150, 166-175, 192-198, 221-243, 249-255, 263-278, 283-288, 305-321, 324-334, 342-349, 355-366, 377-390, 413-425, 442-448 and 130-178 of Seq ID No 257; amino acids 17-26, 41-51, 54-61, 64-72, 78-105, 117-125, 127-137, 147-155, 175-213, 230-236, 238-261, 271-277, 282-297, 309-318, 329-347, 355-372, 377-390 and 69-126 of Seq ID No 258; amino acids 4-48, 54-60, 62-69, 73-81, 88-115, 124-137, 139-154, 156-169, 171-190, 194-231, 240-273, 288-303, 336-363, 367-395, 405-411, 434-442, 449-454, 466-483, 491-507 and 226-282 of Seq ID No 259; amino acids 26-34, 39-47, 50-80, 82-88, 97-105, 108-127, 131-137, 162-180, 185-191, 198-203, 209-214, 226-247, 256-288, 296-305 and 149-239 of Seq ID No 260; amino acids 5-28, 30-54, 73-84, 89-98, 109-116, 122-128, 137-142, 163-189, 207-236, 245-280, 288-390, 404-423, 426-433, 450-474, 487-504, 506-513, 524-530, 532-595, 605-614, 620-626, 631-638, 644-657, 667-683, 686-693, 695-702, 707-733, 739-747 and 6-62 of Seq ID No 261; amino acids 23-31, 39-50, 55-67, 76-100, 117-130, 149-171, 173-185, 218-238, 242-288, 291-298, 334-346, 355-369, 382-399, 413-420, 431-438, 442-449, 455-466, 486-493, 498-508, 524-531, 540-546, 551-558, 562-570, 575-582, 585-596, 598-604, 621-630, 632-650, 670-677, 682-701, 736-749, 755-761 and 612-626 of Seq ID No 262; amino acids 4-21, 24-39, 44-68, 74-81, 85-91, 109-116, 129-138, 142-148, 173-188, 195-201, 207-212, 223-228 and 126-148 of Seq ID No 263; amino acids 4-17, 24-42, 61-67, 84-93, 96-102, 116-121, 135-143, 155-165, 177-186, 210-224, 253-259, 272-297, 299-331, 337-351, 359-367, 369-385 and 1-49 of Seq ID No 264; amino acids 4-25, 28-54, 67-81, 85-136, 138-143, 157-170, 180-190, 197-203, 205-214, 219-243, 246-270, 277-283, 290-299, 305-311 and 127-182 of Seq ID No 265; amino acids 11-20, 25-33, 75-80, 85-91, 113-124, 143-155, 161-170, 172-184 and 128-176 of Seq ID No 266; amino acids 4-9, 16-26, 28-34, 55-80, 120-143, 150-156, 158-164, 167-178, 185-190, 192-213, 221-237, 242-255, 257-272, 281-290, 325-332 and 48-106 of Seq ID No 267; amino acids 13-48, 59-70, 78-88, 95-112, 129-151, 153-161, 163-182, 214-221, 235-245, 248-277, 281-291, 293-301, 303-311, 315-320, 323-346, 377-383, 390-398, 447-454, 474-487, 491-512, 531-544, 547-553, 582-590, 597-603, 605-611, 623-629 and 410-466 of Seq ID No 268; amino acids 6-26, 39-46, 48-58, 69-75, 109-121, 139-144, 148-155, 166-172, 215-221, 261-267, 313-319, 363-386, 423-433, 447-458, 465-471, 483-494, 497-517, 558-565, 578-586, 589-597, 619-626, 636-645, 659-665, 671-680, 682-693, 733-739 and 152-206 of Seq ID No 269; amino acids 4-19, 23-35, 40-50, 52-58, 65-73, 78-103, 112-125, 146-160, 163-192, 194-200 and 29-90 of Seq ID No 270; amino acids 4-13, 17-32, 40-50, 57-67, 76-81, 88-95, 107-119, 131-142, 144-157, 171-178, 185-193, 197-207, 212-227, 231-238, 248-253, 263-310 and 90-170 of Seq ID No 271; amino acids 9-28, 57-82, 84-93, 126-135, 143-166, 173-194, 196-201, 212-220, 228-254, 269-277, 289-298, 305-316, 320-327, 330-337, 350-359, 373-378, 386-392, 403-411, 421-428, 435-441, 443-458, 465-470 and 80-141 of Seq ID No 272; amino acids 11-48, 54-67, 69-75, 89-95, 101-122, 124-131, 134-157, 159-175, 202-208, 214-228, 258-270, 272-280, 287-295, 298-310, 331-338, 340-417, 427-500, 502-509, 534-552, 556-561, 564-577, 585-592, 594-608, 621-627, 632-641, 643-652, 671-681, 683-709, 712-743, 758-764, 776-783, 789-820, 835-851, 864-883, 885-910, 913-940, 948-953, 967-976, 994-1020 and 775-825 of Seq ID No 273; amino acids 14-24, 32-54, 58-63, 70-80, 93-100, 108-125, 127-135, 142-153, 155-160, 180-191, 201-208, 210-216, 222-235, 242-264, 267-273, 276-282, 284-308 and 10-59 of Seq ID No 274; amino acids 16-28, 44-68, 70-77, 83-90, 99-129, 131-137, 145-154, 161-175, 183-190, 196-203, 205-220, 238-245, 321-328, 330-338, 366-379, 383-397, 399-405, 412-418, 442-458, 471-483, 486-505, 536-544, 562-568, 583-602, 610-618, 629-635, 641-655, 672-682, 697-705, 714-729, 744-751, 755-762, 766-771, 783-807 and 555-621 of Seq ID No 275; amino acids 4-9, 20-34, 45-54, 60-77, 79-89, 91-100, 102-149, 162-170, 177-189, 193-208, 210-222, 238-244, 252-264, 267-276, 302-307 and 100-140 of Seq ID No 276; amino acids 11-27, 30-49, 56-62, 69-74, 76-85, 94-108, 116-125, 129-147, 153-161, 165-171, 177-208, 217-223, 225-231, 237-255, 260-284, 293-300 and 73-137 of Seq ID No 277; amino acids 4-38, 40-51, 84-97, 99-106, 109-115, 119-129, 131-145, 148-160, 180-186, 188-202, 230-243, 246-267, 274-288, 290-299, 302-312, 317-327, 332-344, 353-377, 381-388, 407-419, 423-437, 447-470, 474-482, 486-494, 501-523, 531-546, 551-556 and 727-740 of Seq ID No 278; amino acids 23-52, 62-76, 87-104, 109-115, 117-123, 129-139, 143-149, 152-170, 172-191, 199-205, 212-218, 220-240, 249-256, 263-275, 297-303, 308-342, 349-380, 382-394, 414-420, 430-441, 446-452, 460-475, 488-505, 514-531, 533-539, 546-568, 570-577, 579-588, 613-625, 632-670, 672-716, 718-745, 759-769, 785-798, 801-807 and 272-324 of Seq ID No 279; amino acids 4-34, 36-43, 56-73, 80-87, 101-134, 148-159, 161-170, 178-185, 195-206, 211-221, 223-248, 259-271, 276-295, 297-308 and 241-296 of Seq ID No 280; amino acids 5-31, 44-50, 64-74, 86-94, 132-147, 154-167, 196-203, 209-219, 253-260, 284-289, 300-312, 319-327, 335-340, 358-364, 376-383 and 166-202 of Seq ID No 281; amino acids 4-9, 12-27, 29-71, 77-84, 90-108, 114-142, 147-164, 180-213, 217-227, 229-282, 291-309, 322-329, 336-353, 365-370 and 317-364 of Seq ID No 282; amino acids 36-41, 52-66, 71-83, 89-95, 116-127, 154-174, 176-184, 200-206, 230-237, 248-259, 269-284, 307-316, 376-383, 399-418, 424-442, 445-451, 454-462 and 1-50 of Seq ID No 283; amino acids 9-14, 33-49, 64-72, 87-92, 103-109, 123-128, 130-141, 143-154, 160-166, 182-214, 237-247, 251-260, 292-300, 327-332, 337-350, 357-365, 388-398, 405-411, 422-428, 451-459, 478-488, 520-531, 534-540, 558-564, 580-586, 591-600, 605-615, 629-635, 641-653, 658-672, 212-244 and 533-611 of Seq ID No 284; amino acids 4-10, 17-27, 30-37, 44-62, 80-85, 94-114, 118-131, 134-141, 148-161, 171-212, 218-241, 248-261, 274-313, 325-336, 342-348, 359-373, 391-397, 424-431, 454-474, 489-495, 497-503, 505-515, 548-553, 560-580, 591-610 and 277-324 of Seq ID No 285; amino acids 7-16, 18-24, 30-47, 49-70, 83-99, 103-117, 126-141, 146-153, 159-165, 177-194, 198-221, 236-246, 255-262, 273-279, 283-296, 301-332, 338-411, 422-428, 434-440, 452-458, 463-469, 494-509, 511-517, 524-531, 548-554, 564-572 and 335-389 of Seq ID No 286; amino acids 9-15, 33-54, 56-80, 102-108 and 1-42 of Seq ID No 287; amino acids 15-36, 42-55, 58-68 and 54-77 of Seq ID No 288; amino acids 55-75, 89-96, 98-110 and 14-36 of Seq ID No 289; amino acids 8-14, 29-51, 73-101, 110-117 and 70-114 of Seq ID No 290; amino acids 20-25, 29-34, 41-52, 60-67, 69-85, 90-100, 114-122, 136-142, 160-170, 174-181 and 21-58 of Seq ID No 291; amino acids 14-22 and 4-13 of Seq ID No 292; amino acids 22-40, 54-66, 88-105, 109-118 and 31-74 of Seq ID No 293; amino acids 5-11, 18-32, 47-60, 66-73, 83-92, 113-120, 126-141, 151-164, 167-174, 201-211 and 118-129 of Seq ID No 294; amino acids 5-11, 18-24, 32-40, 47-53 and 25-54 of Seq ID No 295; amino acids 18-24, 31-48 and 5-55 of Seq ID No 296; amino acids 10-16, 26-32, 47-56, 85-95 and 10-62 of Seq ID No 297; amino acids 4-12, 16-26 and 25-34 of Seq ID No 298; amino acids 19-29, 45-51, 63-68, 76-92, 103-110, 114-120, 123-133, 135-141 and 14-78 of Seq ID No 299; amino acids 4-18, 47-61 and 57-93 of Seq ID No 300; amino acids 17-29, 44-50 and 26-38 of Seq ID No 301; amino acids 5-19, 55-64, 78-85, 95-101, 104-112 and 24-33 of Seq ID No 302; amino acids 4-10 and 12-31 of Seq ID No 303; amino acids 4-12, 27-41, 43-58, 60-67, 76-86 and 13-65 of Seq ID No 304; amino acids 30-38, 57-67 and 5-32 of Seq ID No 305; amino acids 30-43 and 2-21 of Seq ID No 306; amino acids 14-20, 23-36, 41-48 and 1-52 of Seq ID No 307; amino acids 18-33, 51-58, 76-82 and 32-46 of Seq ID No 308; amino acids 25-31 and 2-16 of Seq ID No 309; amino acids 14-23, 50-58 and 9-49 of Seq ID No 310; amino acids 4-10, 22-31, 35-45, 48-68, 71-80 and 17-66 of Seq ID No 311; amino acids 4-24, 28-42, 46-56, 63-69, 87-94, 112-131 and 2-46 of Seq ID No 312; amino acids 4-15, 19-28, 34-41, 52-62, 78-86 and 2-20 of Seq ID No 313; amino acids 4-11, 16-30, 32-42 and 7-38 of Seq ID No 314; amino acids 4-20, 22-31 and 22-38 of Seq ID No 315; amino acids 4-19 and 17-32 of Seq ID No 316; amino acids 7-13, 17-22, 27-33, 80-100 and 26-40 of Seq ID No 317; amino acids 10-18, 22-48 and 32-44 of Seq ID No 318; amino acids 15-24, 43-49, 73-83 and 45-93 of Seq ID No 319; amino acids 22-29, 46-55, 57-63 and 5-17 of Seq ID No 320; amino acids 10-33 and 21-35 of Seq ID No 321; amino acids 16-24 and 22-49 of Seq ID No 322; amino acids 4-16, 37-73, 76-110, 117-125, 127-132 and 2-30 of Seq ID No 323; amino acids 4-12, 23-35, 44-56, 59-88 and 22-76 of Seq ID No 324; amino acids 15-26 and 23-35 of Seq ID No 325; amino acids 12-22, 31-40 and 17-44 of Seq ID No 326; amino acids 4-9, 13-18, 29-35 and 57-64 of Seq ID No 327; amino acids 31-55, 67-81 and 25-70 of Seq ID No 328; amino acids 13-24, 51-58 and 13-26 of Seq ID No 329; amino acids 6-20, 29-40, 57-79 and 46-88 of Seq ID No 330; amino acids 8-14, 41-54, 68-76, 83-93, 106-126, 130-139 and 12-72 of Seq ID No 331; amino acids 5-13, 17-24, 41-55, 64-69, 80-85, 94-107, 109-115 and 53-88 of Seq ID No 332; amino acids 5-12, 32-54, 57-64 and 20-33 of Seq ID No 333; amino acids 4-16, 40-48, 50-58, 62-68, 75-85, 92-104, 108-116, 124-134 and 68-128 of Seq ID No 334; amino acids 7-13, 19-29, 34-40, 54-71, 76-81, 91-144, 147-155, 157-188 and 11-83 of Seq ID No 335; amino acids 17-24, 32-41 and 6-43 of Seq ID No 336; amino acids 14-31, 38-59, 69-87, 95-102, 126-146, 157-162, 177-193, 201-227, 238-251 and 63-78 of Seq ID No 337; amino acids 10-16, 18-25, 27-41, 43-52, 59-86, 94-101, 134-140 and 38-100 of Seq ID No 338; amino acids 4-19, 23-35, 43-72, 78-92 and 37-93 of Seq ID No 339; amino acids 15-20, 27-32, 41-65, 69-82, 93-105, 107-115, 120-147, 170-178, 184-201, 214-257, 272-281, 293-314, 332-339, 358-364, 374-381, 390-397, 399-414, 428-460 and 317-375 of Seq ID No 340; amino acids 11-28, 47-55, 59-68, 76-105, 108-116, 120-144, 146-160, 167-175, 180-187, 209-233 and 144-158 of Seq ID No 341; amino acids 4-13, 58-78 and 14-77 of Seq ID No 342; amino acids 26-31, 44-49, 57-64, 67-74, 107-112, 116-152, 154-181, 202-212, 241-255 and 57-101 of Seq ID No 343; amino acids 10-41, 53-70, 81-93, 100-111, 137-147, 164-169, 183-190, 199-210, 216-221, 226-240 and 84-95 of Seq ID No 344; amino acids 12-45, 48-56, 73-79, 91-103, 106-112, 117-125, 132-143, 154-160, 178-201, 208-214, 216-225, 260-266, 276-283 and 98-115 of Seq ID No 345; amino acids 4-15, 30-42 and 29-39 of Seq ID No 346; amino acids 22-53, 55-73, 80-88 and 33-66 of Seq ID No 347; amino acids 6-23, 44-54 and 56-67 of Seq ID No 348; amino acids 8-21, 35-44, 66-75, 82-87, 94-101 and 32-94 of Seq ID No 349; amino acids 8-20, 23-32, 36-50, 53-69 and 15-69 of Seq ID No 350; amino acids 8-22 of Seq ID No 351; amino acids 31-37 and 2-31 of Seq ID No 352; amino acids 4-20, 23-39, 58-63, 71-78, 97-102 and 22-82 of Seq ID No 353; amino acids 23-44, 135-152, 168-184 and 57-116 of Seq ID No 354; amino acids 24-31, 42-50, 52-62, 93-117 and 43-94 of Seq ID No 355; amino acids 20-29 and 24-43 of Seq ID No 356; amino acids 12-57, 59-74 and 22-40 of Seq ID No 357; amino acids 7-16, 18-26, 39-45, 68-78, 86-92 and 65-82 of Seq ID No 358; amino acids 5-17, 19-34, 42-48, 56-71, 102-113, 118-129 and 67-111 of Seq ID No 359; amino acids 4-33, 50-71 and 13-55 of Seq ID No 360; amino acids 9-17, 23-30, 37-54, 69-88, 96-102, 114-123, 130-140, 143-163 and 5-70 of Seq ID No 361; amino acids 4-23, 27-52, 71-80 and 9-94 of Seq ID No 362; amino acids 13-19 and 2-21 of Seq ID No 363; amino acids 18-26, 28-52, 63-74, 94-107, 123-134 and 18-84 of Seq ID No 364; amino acids 19-33, 57-68 and 26-48 of Seq ID No 365; amino acids 4-26, 31-37, 42-59 and 12-65 of Seq ID No 366; amino acids 4-25 and 20-39 of Seq ID No 367; amino acids 40-51, 54-62, 67-75, 83-89, 126-146, 148-156 and 31-42 of Seq ID No 368; amino acids 4-15, 23-33, 38-49, 82-98 and 7-91 of Seq ID No 369; amino acids 6-26, 36-57 and 40-64 of Seq ID No 370; amino acids 6-15, 21-28, 32-38, 57-65, 78-103, 114-134, 138-144, 154-163 and 41-95 of Seq ID No 371; amino acids 13-30, 47-57, 71-76 and 25-71 of Seq ID No 372; amino acids 4-31, 43-51, 55-63, 67-72, 76-83, 88-95, 99-118, 125-132, 134-159 and 82-118 of Seq ID No 373; amino acids 4-17, 26-32, 34-40, 45-61, 67-92 and 41-97 of Seq ID No 374; amino acids 179-208 and 198-227 of Seq ID No 204; amino acids 45-69, 65-89 and 83-106 of Seq ID No 205; amino acids 269-290 of Seq ID No 206; amino acids 209-230, 226-249 and 245-269 of Seq ID No 207; amino acids-9-15, 10-33 and 28-52 of Seq ID No 208; amino acids 29-50, 45-67 and 62-85 of Seq ID No 209; amino acids 96-120, 115-139 and 134-158 of Seq ID No 210; amino acids 519-543, 539-563 and 559-584 of Seq ID No 211; amino acids 10-35, 31-56 and 52-77 of Seq ID No 212; amino acids 382-407 and 403-428 of Seq ID No 213; amino acids 66-90 of Seq ID No 214; amino acids 38-65 and 61-88 of Seq ID No 215; amino acids 56-85, 198-221, 217-240 and 236-261 of Seq ID No 216; amino acids 108-132 and 128-153 of Seq ID No 217; amino acids 13-37, 33-56, 52-76, 175-200 and 196-220 of Seq ID No 218; amino acids 132-156, 152-176 and 172-195 of Seq ID No 219; amino acids 489-512, 508-531 and 526-549 of Seq ID No 220; amino acids 416-442, 438-465 and 461-489 of Seq ID No 221; amino acids 199-222, 217-240 and 235-257 of Seq ID No 222; amino acids 25-55, 51-81 and 77-107 of Seq ID No 223; amino acids 18-46 and 42-66 of Seq ID No 224; amino acids 575-601 and 597-623 of Seq ID No 225; amino acids 274-299, 295-320 and 316-339 of Seq ID No 226; amino acids 32-61 and 57-85 of Seq ID No 227; amino acids 266-291 and 287-313 of Seq ID No 228; amino acids 85-114 of Seq ID No 229; amino acids 36-64 and 83-109 of Seq ID No 230; amino acids 264-285 and 280-300 of Seq ID No 231; amino acids 102-128 and 124-152 of Seq ID No 232; amino acids 404-429 and 445-468 of Seq ID No 233; amino acids 343-374 and 370-401 of Seq ID No 234; amino acids 158-182 and 178-202 of Seq ID No 235; amino acids 151-180 of Seq ID No 236; amino acids 549-579, 575-605 and 601-630 of Seq ID No 237; amino acids-7-23 and 19-46 of Seq ID No 238; amino acids 48-75 and 71-98 of Seq ID No 239; amino acids 789-813 and 809-834 of Seq ID No 240; amino acids 759-783 of Seq ID No 241; amino acids 160-188, 184-211 and 207-232 of Seq ID No 242; amino acids 130-159 of Seq ID No 243; amino acids 117-147, 143-173 and 169-201 of Seq ID No 244; amino acids 248-276, 272-300 and 296-323 of Seq ID No 245; amino acids 21-43 of Seq ID No 246; amino acids 231-256 and 252-278 of Seq ID No 247; amino acids 62-91, 87-115 and 199-227 of Seq ID No 248; amino acids 116-141, 137-162 and 158-183 of Seq ID No 249; amino acids 46-69, 65-87 and 82-105 of Seq ID No 250; amino acids 117-142 and 138-163 of Seq ID No 251; amino acids 208-233 and 229-255 of Seq ID No 252; amino acids 61-88 of Seq ID No 253; amino acids 99-124, 120-145 and 141-167 of Seq ID No 254; amino acids 74-103, 99-128, 124-152 and 148-176 of Seq ID No 255; amino acids 202-231 and 227-256 of Seq ID No 256; amino acids 129-154 and 150-178 of Seq ID No 257; amino acids 95-126 of Seq ID No 258; amino acids 226-256 and 252-282 of Seq ID No 259; amino acids 171-198, 194-221 and 217-240 of Seq ID No 260; amino acids 35-65 and 61-91 of Seq ID No 261; amino acids 608-631 of Seq ID No 262; amino acids 124-149 of Seq ID No 263; amino acids-14-21 and 17-49 of Seq ID No 264; amino acids 127-157 and 153-182 of Seq ID No 265; amino acids 150-176 of Seq ID No 266; amino acids 48-79 and 75-106 of Seq ID No 267; amino acids 435-466 of Seq ID No 268; amino acids 151-180 and 176-206 of Seq ID No 269; amino acids 126-151 and 167-190 of Seq ID No 270; amino acids 89-118, 114-144 and 140-170 of Seq ID No 271; amino acids 80-112 of Seq ID No 272; amino acids 9-36 of Seq ID No 274; amino acids 117-140 of Seq ID No 276; amino acids 72-97, 93-117 and 113-137 of Seq ID No 277; amino acids 723-746 of Seq ID No 278; amino acids 271-300 of Seq ID No 279; amino acids 240-271 and 267-296 of Seq ID No 280; amino acids 165-188 and 183-206 of Seq ID No 281; amino acids 316-344 and 340-364 of Seq ID No 282; amino acids-3-27 and 23-50 of Seq ID No 283; amino acids 212-244, 532-561, 557-586 and 582-611 of Seq ID No 284; amino acids 276-302 and 298-324 of Seq ID No 285; amino acids 335-364 and 360-389 of Seq ID No 286; amino acids 41-64 and 59-82 of Seq ID No 287; amino acids 53-77 of Seq ID No 288; amino acids 13-37 of Seq ID No 289; amino acids 69-94 and 90-114 of Seq ID No 290; amino acids 19-42 and 37-60 of Seq ID No 291; amino acids 1-25 of Seq ID No 292; amino acids 30-54 and 50-75 of Seq ID No 293; amino acids 111-135 of Seq ID No 294; amino acids 25-54 of Seq ID No 295; amino acids 67-98 and 94-126 of Seq ID No 334; amino acids 9-32, 27-51, 46-70 and 65-86 of Seq ID No 335; amino acids 1-24 and 20-44 of Seq ID No 336; amino acids 58-82 of Seq ID No 337; amino acids 37-62, 58-82 and 77-101 of Seq ID No 338; amino acids 37-68 and 64-93 of Seq ID No 339; amino acids 317-347 and 343-375 of Seq ID No 340; amino acids 140-164 of Seq ID No 341; amino acids 13-40, 36-60 and 55-79 of Seq ID No 342; amino acids 56-79 and 75-101 of Seq ID No 343; amino acids 77-101 of Seq ID No 344; amino acids 94-118 of Seq ID No 345; amino acids 46-105 of Seq ID No 205; amino acids 56-111 of Seq ID No 216; amino acids 25-107 of Seq ID No 223; amino acids 19-66 of Seq ID No 224; amino acids 85-114 of Seq ID No 229; amino acids 37-109 of Seq ID No 230; amino acids 266-296 of Seq ID No 231; amino acids 103-152 of Seq ID No 232; amino acids 167-218 of Seq ID No 235; amino acids 790-834 of Seq ID No 240; amino acids 761-781 of Seq ID No 241; amino acids 176-232 of Seq ID No 242; amino acids 117-201 of Seq ID No 244; amino acids 249-323 of Seq ID No 245; amino acids 232-278 of Seq ID No 247; amino acids 209-255 of Seq ID No 252; amino acids 75-176 of Seq ID No 255; amino acids 202-256 of Seq ID No 256; amino acids 130-178 of Seq ID No 257; amino acids 69-126 of Seq ID No 258; amino acids 126-148 of Seq ID No 263; amino acids 1-49 of Seq ID No 264; amino acids 127-182 of Seq ID No 265; amino acids 48-106 of Seq ID No 267; amino acids 410-466 of Seq ID No 268; amino acids 152-206 of Seq ID No 269; amino acids 555-621 of Seq ID No 275; amino acids 166-202 of Seq ID No 281; amino acids 317-364 of Seq ID No 282; amino acids 1-50 of Seq ID No 283; amino acids 277-324 of Seq ID No 285; amino acids 14-36 of Seq ID No 289; amino acids 6-43 of Seq ID No 336; amino acids 57-101 of Seq ID No 343; amino acids 84-95 of Seq ID No 344; and amino acids 98-115 of Seq ID No 345.

26. The antigen according to claim 25, whereby the antigen further consists of
a) 1 to 50 additional amino acid residue(s); and/or
b) at least one additional amino acid residue heterologous to the core amino acid sequence.

27. (canceled)

28. The antigen according to claim 26, wherein the antigen comprises at least 2, at least 3, at least 4, at least 5 or at least 6 core amino acid sequences as defined in claim 25.

29-38. (canceled)

39. An antibody, or at least an effective part thereof, which binds to at least a selective part of an antigen or a fragment or variant thereof as defined in claim 12.

40-59. (canceled)

60. A method for the treatment of a Klebsiella infection in an animal or human in need thereof, comprising the step of administering to said animal or human a therapeutically effective amount of an antigen, or an active fragment or an active variant thereof, as defined in claim 12.

61. A method for immunizing an animal or human against infection with a Klebsiella organism, comprising the step of administering to said animal or human an effective amount of the antigen, or an active fragment or an active variant thereof, as defined claim 12 or an antibody as defined in claim 39 wherein the effective amount is suitable to elicit an immune response in said animal or human.

62-63. (canceled)
